United States Patent Application Publication US 2026/0357256 A1 - sequence listing, part 17

SEQ ID NO: 9 - DNA, 58617616 bp, Homo sapiens (residues 34,736,369-36,907,391 of 58,617,616)
  source 1..58617616: mol_type = genomic DNA
agctatgattatgtcactgcactccagcctggcggcagagcaagaaaaaagtaacagctaaagtgaactaatgccaaaatcattcattggttcatcttctaaacacttaggaagtatctgttaggaaaagttgtacatggattttggtgtacactgacacacaggacttcatgatctagtgcagtattgtctaagagaactttctgcagtggtggaagtgctctgcatgtgtactggtcagtacagtagccaccagccctgtatgactattgagtacttgaactgtggcttaagcaactgagaaactgaattttaaactttacttattttatttttacattttaattaatttaaatgtatgtagccaaattgcctagtggctactgtattgaggattgcagcactggtagaaaagtaagaaagcataagaaattaaaataaatgccaggacagataggctatgttcttttggggacagagatgagtgaacaccccaggctgcccagacaactgaaggggaagaaggaagcatccctggctctaacttgtaataacctgttcatcataaagctatgagaaatgtttttttgatttgggataaagggaattaactaacacagtggcaactccaattaacaggtgaatttaggataaattatgtgtagcaaattgaactgtaaggtcttacttgattatttggaaaatgtatgtattggattgtatctgcttggctataaaaaagagatttcttcctgtccttttaatctcattagtggattgcctgtgaagtgcatcacagttgatttagtgattattaagtaataaaactgtgttctttttttctacatttgtggagaggattttctgccattggcaggagatttgaattttaattattttcccaacacctggcaaaaataaattctgcctttaaaaccaaagacgagtatcactggtgaacatgcatgcaaaatatccaaataatgtaatacaatgctgaattaactctcagagctaaaaaattaccacaggcaagcagtctgtttcacaaatcaaagacagtaataatgctgtattaaatagatgtattttttgtacatattataatttgactagccaataaactattattgaatatttaagcttccaaagttttactaaaaagtaatattgtgaaatgagtactattgaaaggaatttctaagccacatctgtgaacatttccttattttctttgaaacgtacccctttatttttttccctttactttcaggtcttatttaaggactatctaaggcagtggtgcccaacctttttggcaccagggatcggttttgtggaagacagtttttccacagaagcaggaggtggtggtttgggggtgaaactgtttcacctcagatcatcaggcattagttcaattcacataaggggcgtgcaaccttaatcccttgcatgcgcacttcacagtagggattgcgctcctatgagagtctaatgccatagctgatctgacaggaggcagggctcaggtgataaaagtcatttgcctgccactcatctcctgctctgtggcctgatttctaacaggccacagactggtaccagtggttatgtacccctaaccatcaggggattagggacccctgatctatggcatgaaaccatccttcagtcttttcacccaggggtctcatattttaataattgtctatcagtacaaagtttaagtatacaccataaatatatttttcttttttgtttatgaatcagttatgtgtatattttagtccattggtgctgctataacagaataccacagactgagtaatagaaattgacttctcatggttttggagcctgggaagtccaagatcaaggggcaggcatccagcaagggccttcttgctgtgtccttttatggtggaagggcgaagagaagagagagaaccaaaaaggggcccaaactcattttttaaataaggaagtcactcctaatgatgatgacattaatccattcatgagggcagagccctcaaggcctaatcatctcctaaggtctcacctctcaaaactgttacagcggcgattaagttcaatacacgcgttttgggggtcacaatcaaaccataacagtgtatgtctattagtctttaatataaaggttttttttttgtttttgtttttttttttgagacagagtcttgttctattacccaggctggagtgcagtggcgcaacctccgcctcttgggttcaagccattctcctgcctcagcctcccaagtagttgggattacaggtgtgagccaccacacccagctgcccattttttgtgagccttagtggatcatcctgagtatcccatttgagagacaatcactttaccctcattttttaattacttacctagcagttaagctgtaaaagatataactaaatacttgactctgtgctgtcaaatgtcaaatgctgatttttaaaaattcatgtatttctgtaacttttagcaaaattaactctactgaagcaaagctctcatatttgtttctcacctttattgtataataattctaagcacataactgtcccccttattgtatagtaattccaactacataactgtcctattattacttaactgagatcacattcccaatcattgccacaactcctgaatcttgttccatttctcccacaaccaggctaattttaccctttcttcagtgacagaagaggcctgggctatggctgagcctaaatatgtttgctatttcaggtgacatttaatgatgtggctatagacttcactcatgaagagtggggatggctcagttctgctcagagggacttatacaaggatgtgatggtccagaattatgagaacctggtctctgtaggtaaggatattaccccttccactccagtaggggacacctttcttttgccaccctgaattgctggagaccctcctaagtaaatggctgaatttctgtagcatgttcccaaggaaatgtgcagctctgttgtgccctgcctgaagcttatctttccatttcgatgaatacccttcatcccttcctgtggtccctcttgtgatggcctctcataatagaggaccacggcttaaacaattctgtattcttcctgtaagcaggtctttctgtaactaagccatatgtgatcacgttattggaggatggaaaagagccctggatgatggagaaaaaactgtcaaaaggtatgattccaggtgagtcatggtgaacgagacaaaggaagattttgttaaaaagggtcccaaactctttatagtgagtttatagtgagtgtggaggcattttaggtatactgttttcaaagatctcagatagaaatgaaaaattgtgggatatttagcttagattttcaaaacaattgttcctctatcccaaattattatctgtatcactcatgtcatccaatcaaggttagaggtttttgccttcataataattcaattgttactctattcataacagtaaggcaaattattctttcttaaatctacttaaagaaaaacatactgatagttttaggctaagaaaagctgtcaattagatgggaaatcacttttctaaagctgagcgttgtagatgaaatatgaacatattagaggaaaaaatgaacatatataaatatgtttctaggaatattttctaatgtccaataaatgacatgattcacacagtttcttcataacttcagaaagcctaaatctttgtcagctataaagagcatttagattattgtgtttttactgcaactgtttaataacatcaattctgtattttaagcatgttaatctggcagcaaattgagattaattgaatgttggagaaaaaggctatgagacaaaatgcaatctttcatacatgcatataggcacaaaatgatggcttggaatccagaatgccttccacattttatttctgataacttcctttttttccatactatttcatccattacatatatttttcccatttccattatcacactgtgttcccacttctgtgaactctgtattctctgctccatttgagcactgttcagaaatcattgaaatatttcagttgtcagaactatgtgttttctgggggcttcatttctaatccagttctcctaattccaatttagaagtttcttttcaaatagttaaaaaaaaacaaaacagtgctttgcttttttgatgtatttcagattgggaatcaagatgggaaaacaaggaattatcaacaaagaaggataattatgatgaagattcaccccaaacagtaataatagaaaaagttgtaaaacaaagttatgaattttcaaattctaagaagaatttggaatatatagagaagttggaagggaagcatggaagtcaggtagaccatttcagaccagcaattctcacctctagagaaagccccactgcagacagtgtttacaaatacaatatatttagaagcacctttcattcaaagtctactctttctgaaccacaaaaaatttctgctgaagggaattcacacaaatatgatatattaaagaagaacttaccaaaaaagtcagttataaaaaatgagaaagtcaatggtggaaagaaacttttgaattctaataaaagtggggcagccttcagccagggcaaatctcttacccttccccagacttgtaatagagagaaaatctatacatgcagtgaatgtgggaaagcctttggcaaacagtcaatcctcaatcgccactggagaattcatacaggagagaagccctatgaatgtcgtgaatgtgggaagacttttagccatggctcatcccttacacgacatctgataagccatagtggagagaaaccttacaaatgtattgaatgtgggaaggcctttagccatgtctcatcacttactaaccatcagagcactcacactggagagaaaccatatgaatgtatgaactgtggaaagtcttttagtcgtgtgtcccatcttattgaacatctaagaattcatactcaagaaaaactctatgagtgtcgtatatgtggaaaggccttcattcataggtcatctctcattcaccatcagaaaatccatactggagagaagccttatgaatgtagagaatgtgggaaagctttctgctgtagctcacaccttactcgacatcaaagaattcacactatggagaaacaatatgaatgcaacaaatgtctgaaagtctttagtagcctctcatttcttgttcagcatcagagtattcatactgaagaaaaaccctttgaatgtcagaaatgcaggaaatccttcaaccagcttgaatcactgaatatgcatttgagaaatcacattagattgaaaccctacgaatgcagtatatgtgggaaagcctttagtcataggtcatccctgcttcaacatcacagaattcatactggagagaaaccttatgaatgtattaaatgtgggaagaccttcagctgtagttcaaaccttaccgtacatcagagaattcacactggagaaaagccatataaatgtaatgagtgtgggaaagcttttagcaaaggctcaaatcttactgcccatcaaagagtacataatggagagaaacccaatagtgtggtaagtgtggaaaagcctttagactatatgaatcactatacatgtgagaaatcttacagaagagaaactgtatgaagcagtggttatcatggtaaatttcctagattctcccttatttaacattagaaaaatttatactggggaaagtcttatgaatgtggtgaatataggaagaccttttagcaaagatgcaggccagtttgtttattagactttatactgtagagaaatcatatgaagaccataaatgtgggaaagcctttgtcagtattaatcccttaattgacataagtatactcacactaggataaaaccctgtacatgtagcaaatgtgggaaagactacagacaataggaatcttttacaaactcctacaggagagaagctgtatgaatgtagaaaatttagaaattgagggaagtcttcagttccaagtatatcccttattctacagcagagaactcaaaatggagagaaatctcatttaagagatgtagcaaagtgttcactaagagtgtttatcttggtacacatcagaagattaatggtagaacaacctgaaggatttaggagttatgtgtaaatctttgcagtcatgctatttgtaaactggattctacaggagagcaaataaacattataataaaatatgcatttcttagagcagtagcttgcagtttcagttgagttctacttagaaattctttttagctagtgggcatgtgaagatatttagtcacccagaggagccagtaagtgttataatattgaaaattaaagctgcaaaagaaataaagtgatgttaataaaagttttggcatctaataaaatcattttgtatatcacaaactctttcactgtgactatttcctgtaaaaaaaatttcactaagattagccttagcgtagcctttagtgggagactagcaaacctagagaaaaatgacctgctctttatactaagaatagcagtattttgatgaggattattcagagtcaatttccagtaggcttaatcaaatacatttcaaaaaaatttactgagcatcactcgtgtattattacacagcgatgggatataggaatccagtagttctgagctttagtggtgtgtcaaagtcagtaggagggcttgttaaagcacagattgctaagtctgaatcttagggtttctgtatgagttgatttgaatttgcatttttcatgcgttcttaggcgacacactgtccagaaagcacattttgataaccattgtaataatgaacaaaacaaatctgatctttttctcgcagggatgttatctgacaagaaagatggatagcaaataaatttgaaataatggtttacaagtgctatgaggacataaccaagaaacaacatactacaagagatcagagcaggcttagcgagatgtgatttttgaaatgaatcctaaatgatgaacactaattatgtaatgagtactactcatgtagccatgtgcatccctgcatgtgcctgtgcgtgtgtgtatgcggtgtgctgggtgttaatctaggtaaagcagacagtcgagttctgtcatacttgctgcagctggattccacgttcccatgtctagtttcagattctgtggctttgaggtagtgctgctggcagcatcattgcagcaaccgtcatttctctatccctgagtcatagttacgggagtttaccttgaaatcactagcccagaagtgttctcattacttttacagcccacctaccaattttgaaagcactaatttgcagcaatatatgtcttgaaatagttaagagagattttgttctctgcactgaaccttgacagataattatgttttgtaaggaggcaggatggcttcaaatattctaagttctagataagaaatggaacagtctcactggccctgtgattagaatcctatcttgtgattagaaaggtaatgcagatcaatttgatttggagtgtatggacactgatgcaagtgaaggggtgtgatatggattatgcttcagattttgttctttatctcaggtgagagtagtaagatatgttattttaaaaaggaacattatgttatagttatgataattctggtgtggaatgagtgataaggtttctgactttcaacaaaatgtatctcctctgatatatgtgctaccttaacagaaagccaaagcacagaggcatattccaatagcaatttgcaagagacagtaggtttggaatggggtggtaaacttttactattttgcagggattttatctttcatttgatttatttttaatcatgaaatttatattgaaattctgtgaaacattgaaggatctttggaagatttataattagggaagggccagatgtagtggctaatgtctgtactcccagcactttgggagaccgaggcaggaggattgcttgaggccaggagtttgagaccagcctgggcaatatagcaaaactcattagtctgttaaaaaaaaaaattacccaggtgtaggcacacatctgcagtcctagctattcaggaggctgagtggggagggattgcttgagtacaggagttttaaggtcacagtgagctatcatcacaccactgctttccagcctggacagcagaacaccaccctgtctccaaagtaaataaatacaattaaggaagcatgatgtggtatcagacagttgcaagtatggatagactggctaccacatatatacttatgggataatgagagtagctttcttttctctcattctgtgtcctttctctgctctcccaagcaactggtaccacagagatgaagtagtcctataatgcccagattttgtttccactacacatagtttaatgctaccatgtcactttgttatgagaggattcatcgaaatacctgtgctttgtcatttaaaaagcatgggcatacacatgataatgctttacgtttctggatttaaagtgccttcacaatacagaactaggaaaaagaaggccatctttttaaatgaagatagttttaagagagcaataagagactattactttgttatgatagaaggttgggctgatgtcataatgatgttatgatgtcactgacatcatattatttcctcagtcatacctattaaccatttcttgagcatccactatgggcttaatagataagaaacactccataccctttaagagccctgaggtgtgtgtgtgtgaacagcattaaactttggagtcatgttacctgggtttaaatccaagttgcatgaatactggctttgtgtgaccttggacaaactatttcactgtgtcttgcctcagtttctccatctgtaaaatgataataaagctatctcacagcattattatgaagattaaatgcattaattggtgtaaagtgtttacaacaatccctggcctctcaatagcattcaataagtattagctattgattacatcatcattgtcttctcatggttgcttcatcattctggtctcaaaggtcacatctaatcacttgtcactcccatgtgtttactgtttaacatttttagaggagagctcttacaaaaccccccgattaacttccaacaaattcttgagtatctgagccattttgagggagggaatgtttcttgccctaaataatctgaggagaaacaaagagaccaggtaggagatgagatgggaacctagcaggtctatgggaaggaaggagggtgccctacagatttggaaaacgggccgagtgaaggaggcatcaggcttccacatgaaggaaaggggaggctctacccagagaccagaagcctacaggtcttcatcatcatctctgaatacagagtcctgtgggctgggtgccactgctttcactcttcctaaatggaggttagagcctgtcattgaaggtcactgatgcctggaaagtcaaacagtttccttgttagccttgggccagtcagatgtgattagagctcagttgttggtaaacatctagaaagaagcaaggcacatatcactgagcacttcctgggaacttatttttttgctgctgagggggagtcagtctttaaacaaattgcaattgtgttagagaaaaaagctttatatgcaaaagtaattgatgcaagatacaagacaatgacaaggccatatggcccaagaggtgcagagtgtaagcactctggcatcaaagataaatagggaaaaactataatcataatacaatactgttaatagcagcagcaactgggccttgtgtttgcactgtgtgctgcattgagacaattaaatgttctatgctctggatccaaattcctaggtgtgaattcagcctattgggactgtcgcttgcttactctataaacttggtgaagtcacttcatttcccaatttttccatcaaaacaaaaacaattcccatcttaccagctggttgtaagaattaaaagatttataaagcaagcaacaaagtgcctctgcatggaagtttgttgccgtgtttttcctgcttttaataatcttcccacatactgtaaggtaaatgccataatcatcttcatgctagtgacctgagtctctctcagagtcacacatcttaggaatataggctacatttgaacattcagtaaaagaccacacaatattgccctcctaggacagatctcagaagactggggtttctcttggcaaccatacaggctctcttggcctccctgaacaaaaaaatgtctcctttggccatgctgttccttctgcctagaatgtgtcccataccccatttattaccacgcttacctgccgagggagtcctgcctaccttgcaaagctcactaggtgtgtcaaagatgaacaaagctggacatttatgacagtggggagaacggactttaattggtaataactattgcaatggggaaaggaatttggcatgaactgaacccagctttgatttgtacagaggtgaatgagtatgttaaaggaagggtgaggaaatagggagggggtggagaagaggggctcagtagagtcagaaaagtgaaaaattacaaaacacaggaagggagggggctggtctatgtgcagtctatctgggtttgctactggcacttgaattaggatcctatcctcccacagagactgtgagacaggggtcttatcttcaggtgttggctggaagaaattctttggacagccttgagtttttcaggccagcactttaaaagttattagaaagtgttagtgttgttcaagtcttaataggcaaaagttgacaggcctattaaagaaggctcagaggggcctagctagagtttggtgaaagaaagagaaatctttgtcaggtatcacctcaggcttccccagcccactgaggaggaatggtggtgaagaagaagaaagaacaaaggctcaagggctcaacatacaggatgtgagtttccgccaagagttgtgtgaccctgagaagataacttaagttttccaaacctcaggttccttttctgtaaagcaggaataatagaacctaactctgaggaaattgggattaaatgaagtgctacataacaagttaccctcagaactcaataaatgtagttattattgttacttagcctctttgcttccacaccaccctggaaaaccgaaccaagtcctgatctctacttttgtaagtgtgccacattctctgcacaaagattccagaagatgagaaatacttaatctagagctagcaaggccaaagggaaaaaaaaaaaagactctcctagtaggtgacattgacattggtgcagaacagggaaggatgcaaaggaggagaggagagggagaggcactgcagagatctggactcagtgtcccaggcagagagaaacactgggaagtgggaaagagcttagaatgatcaggacagcttggcaggagagcagtgagcaaaggaagatggagtagagggcagatttataggcctaaggatgtatctccctagaaatagcatccagagggatgttccttgcacagtgctgggcactgggaacacacatcacacattagccatctctgatactctcatctagaaagaatgatggttaatatttcccctttaagccttccttgaggaaaatggaggtgaaggatagcaagatagcttgcacaaggccacagccctgagatagggtacagcatgatccaaacatgtctctggattctgcaggccatgcctctcccaaggatctgcacatgccactgtacatgaatgggggatactaagaagttatagttcatacttccccaccacataccaccaattgccaagaaagaggaactttcttttgtaatacttgatttaattctaggactctggactgagagtgaccctatcagcaggaagagaaggcctgaagaatcccaggatgccacgatcctccatgtcagcatgccacagccatgtggttgagagtccaagaatgtgagactagttaacacacctgtgctaggagggaggcgactgtatcagtacttcactcagctgaactctctcctaggccctacaaaggtgtctagatgagtcctatcctccttactggccttcctagcttggtcccaaagagtcacctgctccccctgggtggtgtggtcagacaggtcatgtgacaaatgaaagtccactgtagcagtgccaatagtgcaggccacaataatgcaggctgcaggaaacactcctgtcctaggctctcatttgggcatatgaagcacatccttctaggtaatgtagctcttcatattcttcgaggcaatggctaagtagcacccagagggccactaggaatgagcatcaaaagactcttatgaagagagtggtacttcatttcttaaaggtgagtacccagttttccatattttactgcctgcaacagatcacataaatatttagagacatattatttcagatactataaaatactacaaaaccaaatatgtggagtatgatttcagggaaaatgaccaaataggaagtgccacgaatctgccactgtacctgaaaaactattctggcatctttctgaagtaactatgttggaactccagagtttacctgaatgcttgtaatttccagcttgcctaataaattacaatttgtgttgattgcagccatcagagtggtattggctacacattcctcactcccagctccatggcaagcagctttggggatgggaatgtcattctggtgcagatttctggagccagggtgggcaataagtcccttatcccacagatactgaggttttgtgttctgactgtggattggtgcttctgatcttgtgggcttgtaggctagtcatcattgtttcaacccccactggatgaagtgtcttttcacagatataaaagaattgcacctatttttttgtttgtcttcaaaaacaactacatatacggaagaattcagaaagccacctcacatgcccatggaaagatgcaagcactgaaaagaccttcttcagttttcactttaggccgatctctggcacataattatcccataataatgaaaacagaggcaaaaatgcagcaaatccagggaaaggtggcgggaaatatgatttccagagttaccacatggtaagattcaaatgcccagtcttctacaacaacaaaaacctgaaggcatgccaaaaaaacataaaagtatggcccaattaaaggaacaaaatgaatggagggaaaacatacttgaggaaacccagatgtcagtctcgccagaaaaagacaactgtcttaaagatgcttaaaaagctaaagacatgaacaaaggaaaaagatgtatgagcaaaatgaggatagaaataaagagataaaatgatttctaaaaagaacaaaaaacattctagatcaaaatttacagtaatggaaacaaaatatgaatacaataaagggattcagaagacatgcaatcagaggagagattcagcaaacttaaaaacaggaaaatacaaattatcaatataaaaaagaatgaggattggaactttagcacaacaacaatttgggaatccctgaaggggaaaagaaagaaaggggcagagaaaaatacttgaagacataatggctgaaaaatctccaaatttgatgaaagatatgaatttgccaacccagcaagagttcaccatgaatgaactctaagcaggagaattgtgaagagacccacactgagacacataatcaaatgtcaaaagccaaagacagataatcttgaaaataggaagagagaagcaactcctctcatataggggatcctcaagactattagccagtgtctcatcagaaaccttggaagctagaaggaagtgggtcaataaacgtaaagggtgaagaaaaaaagctgtcaatagagaattttatattcagcaaaatgttcttgaaaaattatggagaaattcacatattcccagataaacaaaagtggagggagttgattatcactagacctgctctgcaaaaaaaaaaaaaaaaaaaaaaaaaggctaaaggaggtctatcaggttgaaattaaaagaagctaaaatgtacccaatgacaaaactccatggacataatcagtactggagctcaaattacagttataccgggggatcccattaaatttaagcattgtgcctctcctatcttaagaaagtcactatatataaaatagagaaaaagtaggaatgcctcactttaaatgtagccttgcctatatttcccaagtcataatacccattgccctaatatatcccatattggagcatagatgctctaacataaatcataaattaaggtaggtcttttacaaactggcttgataaaatgggaccccatgaatacccagttaaaatagttaatctggtccaatatagggtacaacagggccttcaagggttaaacctaattaataaaaaggcaattatcccaactgcttctctatttgatatcccaatcttgcctgttaaacctgggggataaaaaaagggtaaagtgcctcatggtgcattactataaccttaacaatgtgttcctaccaattagggcccccatacaaaacagctaatattattaaaattactgattctattaaatcaataatgagcaaatattttgcttttatagatttggagagtgtgttctgttccaggcccatttcaatagcctctcaactacagttcaccttcatttctgaaggaacacaatactcctgtttcaggctacctgtggggtacctcagcagctctgccatcacacacagtctttgcaagatagatcatagctgcatccatttttctccaggagcacagggtggaaggctggatcgagggtgcttattttccttggactcaatgaccatagagactgtcccatgcttcaggcagctactcatctgctatggcacccatttgagcctagacttccacaaacaaaaacagaagatctgttgaatgtactgcacactgttctggtaactattggtctccttactgctgattgggatgattcactggttttcaattcagaggtctaaactccccaaataagcctcaaccaaacatggcaaatgctgagttgcacatcaacttgagagggtacccatttaaaaaggacacccaagtcccacatctcagatgatttcacccttgcccagaagctcactgctggagatgacactgccccagcccaagtctttgccattgtagatgactttacctcttgtgccagggacaacttcaccccagatatgaaaacctctgtcccagtggtgcctatggagtgcctctcctaaggcatgcattaaacatggggtatttatgcttttctcccttggatgttaaaggttctactatgtttctgagcttgctgtctgcctaacctatgattctggtatattccttgctctttgccaaaatgtacaccctacacttccatgtctaacaggaaatctagtagaggttactactatctatgccgttctaaaaattagtggaaattactgctttcctcgggaggcatctgcctcaaatcagtcaaccccttctccccctagaaagagtaccatttactccctgatgccttttctactctcaccttgcatctcctactatgatcactctttccccttgatcacacacaaataccactaacctttacatatacctatcatttcatacccttccaacattacaactgccaaacttgtcactttgacctgaacatgtttctaatgcacttaataacactaccaagatattgttagtgaccctaaagatttcagaactactgtcttggataataccatataaccaaatttaaaaactcccaaagcgccatttgcttaaatctaccacctgccttcattcctcaccagggatggctacatgttatgaccaagttaacctatgggcttaccacttgtgcccaggagccaaccagcagtggccaattccccaccccgaggccttcaccctccttacaatgatactctcatgggtacactatactctgaataatggcacatttggttttttttgtggcttgaaatcacaggcacagcaccttatgtatttttccttgccaatcaccctggatgttttccctaataaaatctggtaaatagtgtttacactggggattgccatggttctttgtccacttggtacttccctgtttccattaacccaaagacacaaggcaaaatgggcagtgtttatccctatcttaataggacttgccataggcacaggagccaccactgctgacaccaatacagcaggctttgtcgaataagatcaaatcataactgccaagcagcgtcattacgtggccctttcagatcatattcaaaggctgtacaaaatactgtccttaatacaacaagcccatgagtctctagctcaaatggcaatagataacaggctggctcttgactattagccagggaaggaggagtttgtgccactcaggatacctcctactgtatgtacattaataactctggacaggtacaggccaactatgaggaacaggtcaaaaggtaaaggtttttcatgacttagccaaatattccaacagattcccttaaatccaggggtgcctggcccattctcttggctttcctccacaaagtgggatgccgtgttacaaactggataccaaaccctcatcatatgcctaataggactcttctgagctgttacctttattaaagtttaccttcagtggctaagtcatgctgtcccaggcacctttaacatcacaacccaggtggcaagtgttatccatccgattagtattgtaatgatgttgaggcaccacagggcaaactgtaatgtaaattttaaagcactgtattttcctgctgcctcggtatccccacaaacaggctgtgagccccccagccagctataccagtgtgattaggctggccctgccacaagttctgttgtgctgtttgtgtactccatcctggctgccaataaaggcacttccccataggtcttcattctcttggctccctaacagctcagttgagccagcctccttgatgctgtctgtgcccccttggttcccttggtgtgcaatgactctctctctaggacctgtaagtataataaaactttgttctttgacaagcctctcctgcgtttcctcctctgcctacacctgactgacagtcctatgagcacacaatttaaatagttctaacaacacaggaatcatgcaaaatattcaatccaaaggcagaagtggggtcgggggagaaaataaagagaatagattaaacaaagagaaaaaccaatagcaaaatgataaattgaaacccagcaatataatcacactaaattcaatgacctaattaaaaggcagagattttcaaagtagataaaatgcaagatccaataatatttcgtacaagaaaaccattttaaatataatgacaaaaattaattaaaaatcaaaggacatggctgggtgtggcggctcatgcctgtaattccagcactttgggaggccaaggcaggctgatcacctgaggtcaggagttcaagaccagcctgaccaacatggagaaaccctatctctactaaggatacaaaattagcagggcgtagtggcaggcgcccgtaatcccagctacttgggaggctgaggcaggagaatcgcttgaacctgggaggcagaggtcgtggtgagccgagattgcgccattgcactccagcctgggcaacaaaagcgaaactctgtctcaaaaaaaaaaaaaaaaaaatcaaaggacacagatacaccattgtaatagtaagcaaaagagcactagagaggctgtattaatattacacaaagttaacttcagaacaaagactattacctaaatatttatatacctaatgaaagaacttaaaaatgatagatatgcaaagagaaatagacaaatccataattacagtagtttttttaaaaaagaaaacaccattctctacataagtgacagaacaagtagaaaatcaggactcagaagacatgagcaacactctcgaccatattgacttacttgacatttatagaacacccaacaagatcagaatgcacactattttcagtaataatgtgtaaacattcttccaggatagaccacattccagatcataaaacaaacctcgacaaatagaaaagggttcaagtcatgcaaagtatgttctcagaccataatcaaacttcatagatcaaagaagaaatcaaaagggaaattaaaaattattagaactgattgaaaattatgtcagaatttatggaatgctactaaaccagtatctggagtgaaatttatagcattaaaggcctatattagaaaaagaatgaaaggtctcaaattaatgacctcagctttagaaggttgagaaattctgacccaagtgtaaaacatacaactgttaaatttttagaaaaaaggaaaaaaaaattttgtgtatctgctaaaatcatcccatgacttcacatagcaattagaattaaatccaaatttcatggtaccctatctgtgcatatggcctgctactccactccatcattaatttctattctccctgtcaagccacactacattgagctgtatcctccaacagtccaagctcttgtcacccttgaggtcttggatatgtggttctctcttcgggactcctgtatgcttcctggttctgcatatcacctaacagactgtaggttcattttcccatgtgtttaatgtccaccttcctactcttacagagagtaacacagctccatggagaagtgcatggccaaggtcacccaatgggtcatggaaacactaaatgatccgaaatcccaatctatcatctaggctcttagccaccaggctcaagataggtacagccacagctacagcagaggtggtcactgtgagggaggatggggtcttcagctcttcccaatgagtagaaaactaaactgctatctgtatatatgattgtgaattctatatttgagaattcacctactaaaattttgttataactccaaaatcaatactttgaggtttttgcatttttgcagtcatttgcagacatgtgcagagtgatgaaaaaaatgattcatcaagcctgcatgtcaccagctgaggtcaaaggtgatgcctactttcttgtttcggcattcataatgtcgtgtcattttcagtcatttagtgcacaatggctcatgcctgtaatcccagcactttgggaggttgaggtgggtggatcacttgaggtcaggagttcgagaccagcctggccaacgtggtgaaaccccgtgtctactaaaaatacaaaaattagccaggtgtggttgtggttgcctgtaatcccagctacttgggaggctgagacaggagaattgcttgaacccgggaggcggaggttgcagtaagccaagttcgcaccattgcactccagcctgagcaagaagagtgaaactctgattcaaaaaaaaaaaaaaaaaaaaagattcattcagtcatgagttatactgctgttgtctgagagttcaatgtctacaaatcaacaacacaatacaaccagaaataggaggaggaaattcacctgtctgtacatgaggcagctcctaaaagtataaaaaggaacatctataatgcataatgcatgatgaagttatagaaaacatgaaaaaaggctaaatttatgggtgaatcagatgatgaccaatagaaaagaatagaggacagcattattgtgagtcttaaagccaaagaaatttatggtcacgatacctaagtaaggaaaatgctaaccctgctcagctagtgctggctactcacacatttcaaaaggcactacaacataaaatgtattaaacttgcaggcaaattcttctgggggctgtggaagaatttaaataatatccactaaatgttatacaggaaaagggttatgtgaaaaaccaggtttcaacactgatgagaatggcttgttttaaaagaaaatgaatctatatagcacaaatggcctccaaagtcccttactttaaatcattcaaagatcctgcaaccttgctactgtgcatcagtactaatggtgactataagtgcaaaccactaatggtgtagagaaccccaaatccgtaggaacttaaagagaaaaacctgagccatatgcaagtccactgtaagtggaacagaaaagcatggatgacttcagaactattctgggattggttttacaactgcttcatccaagaagttgaatgctatctccaaggcaaaaactttgccttcaaagtttaattaattttaaataatgctccagttcattgccataaagaacttgaaaattcccactgcaacctagacattctttttatggccacaaacacatgtgtcatacaacccttcaatcagagcatacttaaaagctttcagggtgcacaacatgaatgacctttatagcaaggcttgtgaggctctcaacaccaacaaggaaaccaccgttttggactactggaagccagtcactgtatgcaatgttatttaggcatcaaagtcagtgatgataaagatggtgacgaaggtcagcctaagattccaagaactgttctcacagcagcaaaaatatcaaactgaaatcctgccctggaaacattttcaattacatggaagaatgtgaccctatgctcgaatgtagcctcaaatttaagcccctaacctccaatgcactcctttatgctgggacactgaggtggagccgggcacagtggctcacgcctgtaatcccaacactttggaggccgaggaaggaggatcacttgagtccaggagtttgagaccacctgagcaatatagtgagacccccatctctacaaaaaacaaattagctgggcattatggcacatacctgtgatcccagctacttgggaggctcaggtgggaggattgcttcagcccaggaggcaaggctgcagtcagccgtgatcactccactgcgctctagcctgggcaacagagtgaaaccctgtctcaaaaaagataaaaacactttaggcgaaaagccagacaaggctgatgcaatttttcatgccagctcaggagggaaaactgctgatgatgtcaacaagtggcaaaagtcaaactcctgaagtaaaactgccagatgttgatatggcaccctcagtaatgccttcctcttctgaaaagtaagttgcatcaacctcttccttagttttttgggggtaagttaaagtcaagcagtttaaccatacagtgcgctgtcccatcacacatcttgcagctccatcaaaagtacaattttaatctttttttaatctttaatgtttttcccccaggactatctttattggcacgactgtactgtatagtataggtgttcacagtaccatttactgttatgaatactgtacagtttgctgtgtttattgtacatgaatactgtatatgtgtactgtgtgtacataattaagagttaaagcagtacaataatatactgagtacattacacaaacatgctataattaaaatatttttattataaagaataattataattattcaagaaacactgataaagtgtctttaaacaaacaaacaaacaaatacccatagaagaaggttatgtgttgactggttgataaaaatgtttggatcagaggctcacagaagctaacgctgtatttcccctagcaacaatcattcagcattcactaattcagtgtgcacagaaaattcacagaacctaactaccacgagtaacaattcactgcatataaatgtacatgtgtacatgtgcacatgtgttaagtatttcatgactcaagcctttatatttctcacaaagacacactccctcaagggtagagatgacagttttggaacaatgaatacttttactaaatgttggcagagctgccctcaatggtccaactctcctggctctggacttagagatatatatatgtaaaacacacaaaggggatgagactttttcaatgtcttattccctgctccatcccccaacccgccaaatgacaaactgtcataaacagggaaactgaaaacaagttatgcacatctttttcttttatcttctagattgtttcctccatctctcattattttaaaatatgcttgagatggatttatagtattaataagaggaaagttgttcctgacattttacctaaatgcatgttaaccaccaggtctctcccctcgattattctcaggtacagtgtaaggctctaaactgggtgaatctttaatataattctttggatgacaagtgattacctgccataaaaagatttcacagggacaattctgtttctagttagtataaattatcagatactaagacatctctctggccaaaatatttccctcaatagttatactcaaaaggaaaggtatgtcaccactatgagttcactaaagacaaacacacttgtaataggccttcctgtatcttttaaactctggtatgaatctttcgatggtgagtgaacgatgaactgtggctgaaggtctttccacattcattgcattcaaagggtttctctccagtgtgagttctcatgtgctgagttaaagcaaagttgtcacagaaggctttctcacattctttgcattcaaaaggtttttctccagtgtggatcctattatgccgaacaaaatttgcaggttgggtaaaagcctttccacattctctacaaacatagggcttctctccagtgtgaatcctcatgtgtcgagtgaaggaagagctatagtaaaaggcttttgcacattctttgcactccaagggtttttgtccactgtgggtcctattatgtcgaataaaaacagagtggtgtgtaaaagcctttccacattcactgcactcataaggcttctcaccagtgtgaatcctcatatgttgaattaaggaagagctgtcacaaaaggccttcccacattctttgcactcaaagggcttctctccggtatgggtcctcttatgtcggatgaaagtggagcgatgagtaaaggcctttccacattcaccgcactcatagggtttctctccagtgtgaatcctcatgtgctgagtgaaggatgagttgaggcaaaaggtttttccacattctttacataaaaatggtttttctcctgtgtgggtcacattgtgctggataaatgtggagcggtgcgtgaaggcctttccacattcaccgcactcatagagtttctttccagtatgaatcctcatatgttgagcaaatgaggagctgtagtaaaaagctttcccacattctttgcataaaaagggtttttctcgagtgtgagtcatattatgctggataaaagaagagcggtgggtgaatgctttgccacattctttgcactcatagggcttatctccggtgtgaatacgctggtgctccgtgaggtgaaacctgcgtttgaaggctttcccacactcaatacacttgtatggtttttccccagtatgaagcctcatatgtcgaatgacatcagccatataacgacaggctttcccacactcattgcactcatagggcttcactccagcatgaatctgttgatgccgaacaagggcccacttcttgctaaaccctttcccacattccgtgcatgtgtaagggttattccttgcatcagtcatggggtcttttcctggtccttgagagtcacactcatggagagcatcttgtggagtgactcgttcctgtaaaacccttaagcccagactatcatctggctccaaatcatcatgtttataactcaacttctcagggcatatctctttgtgggggtttgttcctggcctcaagttcccttcctgaatttttattagcttttcctcatctctagcttgccccaacctggaatctcttgaggatctctgtgccagaagttcctggaaagaggattcctcagagaaggccagctgagaagcagtaggctctgtaatcttgggttttgctttttcacctgaaggaaatccaatataaaaaaaactgaacattagtgatgtcaacagaacaaacaaaatcaccactttagcagaagaatgaaggtgaaaacagtgtctctgatgcctactgcatttttacatctctcaaaaccaggcttgcaatttctttcctaatgcttggactcttgagatctttaaaaggaaacccagaaggaaaagcaagggcagggggcaaagaatctggaatggagaccgctcctcactctcccaaatgagggagagtgggcagactaataattacaatgtgtgtgatgaatgtgctctgacagaggcagtctcatggtgctatgacaatgtagggaggatacacttaacatggcccagatgagagacagagagggatcagaggatgtcttggatcacagcaccaagaaaaggtgagctacgtgggctttctttaaaaaggagagtaggagttcccagacagaggaattaggagggaaacttcggcagatgaaaacagaatgtacaagggctgaaagtcttgagagaatgctgattgctgagtaatgtaaatgggatgacatgatggagatgaggatggaaaggcaggcagagacagagaagaaacagactctcaggattctcacctgtgtaaaagtgagaagggtgagaaccagctagatgaacataatgagtctgcaatgtctgaataaagactaagtgaacatacacaaaataggtaagatctacatgaagaaaattgtaaaacttaagacactaaagatctatatgaaaagagattaatcaatataaagttatcagttctccctaaattcacttctaaattcaatacaacatcagataaaatctcaatagggtttttcacagatattgacaagctgactgtggatagagatcagtcagctgatatagagaccaggataactctgaagaataaagcaggggccttaccctatgaggacttagtattatgatgaaactatatgcattcaggcagtgtgattaggcatagatataagacaaacggtgaaagggaaaaatgaaatagagaactcagaaatgtatatatgtaactttgatatatgatagaagcagcagagaaggccattgggaaaaggaggaaccattcaataaatggatctagaaaaattatttgccacatggagaaaaatgaaataatattcctacctcataccacatacagaattacctccagagtgattaagactcaactgtcagaagctaaacattaaacatattttgtatataataaaaatgagtatcttttgagaaagatttccagaacaagatataaaagcattaatcataaatgaaaagagtagtcaatttgactagagtaaatataataaacaaaaaagcaaacaaataaaaaacataacattagtatcagatagcaaactatagacctaagcaaatgagacaaagagggacttcacaagatgaagagaagaccatggcgccaggaagacaaaatcgtcttaaatctgtatgtgccaaacaccagagcctcaaaatacatgaaccaaaaactgagttgaaaggagaaataaactcagaattatggttgggaacttcactctaccccaaaatgaacatattatgcactgatatttcacagaagacatacattgcccagtcaacataagaagtgttcacctttcttggtaataggggaaaaacaaattaggaccacaatgagatgccccattttatactcgctaggttgaaaaaactaaaggaccggacaacatcaactattgaagaggaagttgttctatgaaatcattcagataaggcaagggaagtgaaatgggtataaccattttaggaaacaacagagcattatctagtaaaattctccttttgctcatcttataatccagaaatgccagtccaaggaactttactaagagaaactcctatagatgtgcctgaggacacatatatatgaattatggcagcattgtttgtgataacaaaaaacaataagcaaacattttcaagctctccctgaaaatggataaatacattgtgttatattcatgcaattgactctagcaggaaaaaaaatgagtgaactacagctatatgcatcatgaatgttagtaacttactgttgaataaagagtgaaaatgccagaagacaatataaaccacaatacactttttataatgttcaaaaaaagcaaaatacacacacacaagaatacaatgtaacaaccttttatttttttgaggtttatcagttttaaatggcattataaaaagatatgtagatatgttaaatatatttttctgactttttattgtgataaaatacaaaatttaccattatgagatgaaacaatcttaaaaagtaatgggaagacaaagataaagtaggcaaatattttacattactcaaattaccaaaacggacaaacaaaaacagaacatctgaatagcctatatttatgaaaaaaacctgaatcttcctacagaataagcaatggaataacaaatcttaaagtggccatgtatgcaagggaggcagcataggaatgggaaaggaaagaaacacatcaacagatgcaggaagcaggtcatgttcttgtacttggcgaaaggtttgtaggtgttcattacaatctttttaaaggaggatgaataaatatattaataaaatgcaatgaaagaaaataaaacaaaaaaccaggacacgcattgactaatgatgacaatgtgtcataaatcattatttataatttttctaattctgcacacctagggacaattatgaaagtcagaggggggccaggcatggtggctcatgcctgtaatcccagcactttggaaggccaagacaggcggatcactgaaggtcgggagttcaagaccagcctggccaacatggtaaacttcttgtaagaagtgaaggcactgagggaaggccatgtgagcacaaagtgagaaggcggccatctgcaagctgagaagacagcccttatcagaacccaacaatgctggtaccctgaccttagacttgcggcctctagacctgagagaaaacacatttctgctatataagccacgcagtctatagtattttattacagcagccagagcagactaacacacttttctaagattcactttcctcatctgaaaaactgggatactctcagttcctgcctacaagttgttaggagaaaaagcatacaaaatattgatttgtggctgggtgtgggggctcacacctgtaatcccagcactttgggaggctgaggcaggaagatcacttgaggccaggagttaccagcctggccaacacagcaaaaccctatctctactaaaaatacaaaaaattcagccaggtgtggtggtgcatgcctgtaattccagttactcaggaggctgaggcacgagaatcacttgaacccaggaggcagaggctgcagtgagccgagattgtgccactgcacactagcctaggcgacagagtgagatcctgtctcaaaaaaaacccaaaaaccaaacaaaagttcattcgtgtgacaaagaataaatgtttggtaaactgtagaccactgtctattatcattatagttgaatttagcaatcaggatggcaacagtgacctgggcaagaacactttaagtgctgtggtgctgagaaacaccactaccaggcatcaaagagtaaagggaaagacaccaactgctcaggcgtacatggaacaatgaagactctcatacgtggctagtggaaatgtgaaatggtgtagttactctgaaactggtggtttcgattaaagctaatcatatgcccacacttgatctggccagtccacttgtatgtatattcccaacagaaatatgggtttatatccaacaaaaaatacaatcaagaatattcataagagtagtcttcataatattccaaaaatggagaccaagtcaaatgtccatcaataggaaaatgggtatatgtagtctattcattcaatgatggtaatgaactaactccaactatatgcaaccacatgaatgaatctgagtcataaagattatcaaaagaagtcaggacagagtatgtactagggggttctatttatatgccttcaaaactaatgtatggtgatatagagtataaacactgactacttttatagaaggggatactgacaaagaatgagcacaaggagcctgttaagtgctgaaaacactgtatttcttgaactgtgagatggtttctctgacttgtacatatataaaactttatagaaatgaaactttatgatttgtacacttattatgtataaattgcacctcagtacaaaaataagggaaaaaataaataaaggaaagtcttgtgtagatgtctcttcaaagaatgagaagacttctccaacaagcttggctgttcaggtgaaatagagtcaacaatatgtagatgctgctggagacgtaagagcactaaaaaaaaaaaagtctcccccaggtatcagaaacatcatcatttttttttaatgttgagtagagaggggatgaaaatatagaagaggtaggaagtaagtgaagaagcatgttccctgatgcagctgagagattcacgtatggcttctcatgatccccaagtcatagtgttcacacccttttgtagttcccctgttaaaatgttggcaggacctcgatttgcttctaaagtatagaatatggcaaagatgatggaatgtacatgataaaatatatgtaattttataagactggaacatccgtcttgctggagtctcacacagtggcttgatttgaagaagtgagctgatggtgatgatgagctatgagctgcctatgacacgcctgagaggacccagctaagctgtgcctggactcccaatccataggtgggagataataaataagtgatgttttcagctgcagggtttgtggtaatattgttacatattaatagtagatggctaatacacctgagaaggcagaaagtgtaatctagattctgctggagaaattagccatggccaggatgataactcttccacagaagtgagaaggaagctgcaggataagtcagatgaacatgaatcagtaagtgtcaaaaagcaagaaaatcaagtgtgtaggctttattcataaagtaggtcagatgctctgacatcagtggcaagggaggcggtgatacatggaacatgtgagtggatgcagatataacacacagggctgaccagatgcacagagcacatgggggaaaacagcgaggaatctggtagcattatgcaggcaagagatgatcacttggcctagagtactaatgctggagctgatggaaactagtgaaggtgaggattcaggagacatgagtgatgtgaaatggtcaagattcggggatggctggatattgggtatgagggagatggaggtgttgaggggttgtccacgtttgtttttagccttctccactcattgaaagaggcattagctgaaaatgggggtgatcatgaggtccttttaggcatgatgagtgtgaggtgcctctgagacattcaagtgaagatgtggaataggggagaggggtgaaggctgactgagcaggcaagaaggacactagaggggtgagatggtgaatctacagtgtcacaaatccacctgcttgatggctccagcttcctctggcagcccagatgtgggactgacaaaggcaatcatcaccttgaggtttttagaagacaggagggccagaaaacaacagggctagggagtgcttctgcgtatctgatacataaatgaaaagatgaatggatggatcaataaatgacgggctggagaaggtgaaaaatggtgggatgcagagtgtagtttgaaatagtaatctgcaggaaaagaaaggactgtcttctgaatgcagaagaatgtctgagctatcactattccttatgactaacactacattaatattacttacaagtaacttctgttgagccactccgggtcaggcagtgtgctaggcagtttcctgctatgtgatcacattcccaaacaacccagtcatgcagaaactatcatcactatctttcaaatgtaggctaagtgtatcagataagtatatgttcactatacccataggctcttctccttgggtataaaaaagctaaaccacatttcccagcctgatacaacatgtagcctaatacccagttcttgtggatgaaatgttaatggaagtgactactgcccttctctcccattcctcttggccggggcaaccttaaagctgcatattgacaacagaatgcatgtgatccataaataaatacagggtacacagctttcctgctgacccacattgggctatggcatggataaaaaaacaaaacaaaacgaaacttaatctgttgagtcacatgattttggagtttatttttcagagaaggtcattaactcagcctaacttatataccaaaggcacagtgacgtcacacaacctctccagagtcatgaggctagtgagtggcaaatcattaaagcctagaatctgtctcctacctaacatattccaacctgaataaaggcaaagagtgtgtgacagaagtgggaagacgggggaccatggggtcaagggctccatgactgctcaagaccacaaaatagctgcccatggcatttcagacacagtgatgcctgggtggtctgcaggctgccctgatacccgctgccagactctcagtcaccaacctgcgcaggtgctttgggagaggcctctcttcactgtccacagttcctgtccatgttccagtagatagatcagctctggtttgggaacaggatgccctgtgcatggagaaacaaatggagtatggtgtacagggaaagacaaaaagaaaagtctgaggtgtaaaggagtacatatatttaacatactgcaatgaaaccccagaaagggccctcccctgcctcaccaaaagtattccctaattaacctaagtcagtaggattcaaccaccctgtgcatcaaaactacctagcaacacccagttccaaaaacagaacaaattaaaccaaatctctgagcagaaggactgagtgctggtagtttttaaagctccccaggtgattttggtgcccatgatggttgaaaaacacaggactaaatcgcctgatgaatggcatctattgatagtcagttgtgtgaggcaggccagtgactgaagctgaacatggaggcctactgccccacaaggatactggccagggccctagaccaaggagagaaagcagacagagaactgggttagcatggattggcactgaccaagccaggagtcagcagcacctcagggcttctcattaggtaaagtaagaaattattttcagggtgaaactggcaggaggtggtcttcttccacatgcagccacacacattttgccaactgtgaaggctaagacagaagactctggagagaagtcaatgactgaggcaccaggacccagaagcatcaactggaaaatcttgtcctggcacgcatccagctgtcacttagcaaatgttcaccataggattacgcacacttacatgccacatgcacactcagcaaatgttctgccatatgcttggcactgagctgggtgatgagcagcattaaaggggaatcaggcctgccttcatctctgttaaggaatcaagcaccctgctcccacagggatgctgctcatgttggtccctcctcctggaatgctgttccccatacatctcctttcgacaactaatcacagttgtcataaaataacaccacgtttacttcattaatgactcatccctcgtgaggacgcaggactgggagagccctgtcgatggtaaccatttgaacaactggaataagtgagactttgggcctccattcatatctactcagaccaacttctgggcaaactgtccattaaaggtttaggtgggagagcatttggtatttattaatttgttaaatgtaacaaacacatgcagaacacttgctatgtttccagctctattctaagcactttacacatattagttaccttgctgtgacaggttactataaaaatggcaaaatcaaaatgataacaggtcccagcaagttcctgctgcctgcttgaggctaggagtttgaggctactctttctactgaggaggaaattcaccaacagctatgggagtgttaaagattcagccctaagccaacactcaacattcaagagacaggaaagagaaaagaaaaaaagaacagctttctcagatagcatacatccatgccatttgagaatgtgtctgtgctccctttccataatcataatcatctcctgtagcagcagaggagcaaggcacaggccttaggaagtaagggttaactgtgcaggtgctaggagccaaagagacctttcagctgagactgtgttgctgaaaaagatataagcagcactgataacaaacaccttcttagtgtctgtgtcaatcacccgctgcttgtagaacctcccattatccacaggtcctgctaactgggctgtgaggacatttgactcaaccaagctgggccaattacctcttgtggcagtctgggataaagatgtcagactgaggccagctgtgctagacagtgggataaaagtgttgaggaggactgtgtttcttacataacaatctttgattgagacacagggaaacccagcaagaggaggtcagaccacaacgtgctgaggctgcagggatcagggaaggttgggttctgaggctcctggaccagccatgcctagaaagggtggattcaaagaggctgtgggtcccctacatgggagggtaatgaggtcttacccagtgagaccaggagcctgcaggtctccagcatcacctcctggtacagggtcctctgggccaggtccaggtgcccccattcctctccagtgaaggtcacaaccacgtcttcaaatgatactaatgcctgggaagtcaaacagaggtgacaggtggctgtggagctattaggtgaaattacagctcacttcttggttactggcaaagggtccagagaccctgaaccactgagcaactcctgagaaccactgggctctgtggaggcagatggtgccgctgacagaatacaaagatgtgggacagaaaagcctcctatgttggaaaccattggaaaatgatacaagacaatgataatcccatctgactgtgaggagcagacagtaatgtcctaggacattacaagaatggggaaaaataataattcaaacaataatcacagcagcagcagctgagcctcactggtctgcactgtttgcctgcacctgagggcttcacatgctgtgttcaagcaactaaaagtctccaggtctggaatcaggctcctgaagtttaaatccagcctcttgaaccaacctgccagatgtgtgaccttggagaagtctcttaatttcttggagctccaatttccacatcaatacattaatagttcccacttcaccgaactgttgtgaaaattaatgagaaaatgttcataaagcaaacactgcagtgcccagcatgtgttacaatgtgtgtaaatttcaatagtcatcctatagcccatgatgtaaatgtcatcatctccatttcacaatcagcaaattgaggctcagagtcaagtcactcagagttgtatgtctaatgagcagaagcaggatttgaacccacatccctcgggtccaggatctatgggtgtaacccctgtactcctccatcaccacagtgaatccacagtgacaagggctaaaaatacttcctacaatttttacagttaaaacaatttcagccactcctgaaaatattgccagaggtatggaaggaagagcagagccttcctttgcctcatagaagaggcacctgaagaggtgccaactgcctagggcttgggagagctcaaacaaagtttccctgccctcaggcagctgggacttgtagactccctggaatatcccacaatgagcgccaacctgttctttttcttcctgagccacggttagcacatttcccttaggtacaggtaacacaagtggccaagggcaatgcaggctgtggctctaagaacctggcagctgccttaagcaccacgtctgtcctgggtgagaatgggatgttggcatgatgatcatcagatgatcacacaagacacgtcagcaggtgacaagccttggtgtcactctatgtctcctcatgcctctgcctttgtccatgcagttccctttgccgggaaggttccccaaagaccccttcattccaatgtccacctgctagagagaggcctgcaccttccccttgcaaagtgtacttcagctgtcgcccccagggatctccaatccactgtgggtgaaatattggttaaaaatgtaagcttctggctgggcacgtcggctcatgccagtaagtactttgagaggccaaagtgggaagactgtttgagttcaggagttcgaggccagcctgggcaacacagtgagcccatctctacaaaaaataaaaaaaattagctgggtgtggtggcacacaccgataatcctagctactcaggaggctcagtggggaggattgctagtgagctgcgatggggccactgcactccagtgtgagcaacagagctagaccctctttcaaaaaaaataaataaataaaaaatgtaggcttttatgctcgacatactggattgtttctgttacttatgagctatgcaaccttgggtagttaatctgagtctccggttcctcttctgtaaagaaaggaaaatgaaagaattttactctgagaagaagggcgttaaataaggtaatacacagaaactgcctctcagcacattatcaatgcgctcagtgaagaccagctactatttgttgctgttagtatttttcctatttgctcctgtcgcaccctaggagagctcaatgcagcacacatccaggagcagccttgcagagatctggcgacaatgtgacagagaaaatcgtccaatgagcttggcatgtgcaggagagaagaatggcagggggagtgtcctggtggattgggcagtgactttgcagccatggtggggtatggggtggggttgggttagatgaaatctaagtaggatgggagccccagaggatagaatctcattcattaatcacttatcgactaagtggtacaggcccagaacagaatagttttgggcctggggatgaaaaacagaacagaagctgacattctggggttgggggacagatcctcagcaataaacaatcaagataaagtcagaagactctagaaaacaacacaagagtgagaagaccacaaagactgggagagactttacatgatgcaaccagggaagctctctctgaagagaccctggaacaaggttagattgaagttagagaacagaccaggtgaggaaaaatgaatagacaactcctgaaggtgatcagagctacgaggagtaaacagtgtgacatgctggagagtaacttggggccttatgtgctcacactccaagagacatacattcatgtacactgtcattaatgaatattgtgctggatttgcttttcaaatacaagagcatgtgttaaacagaagcacggattcactgctgttaggcggcaagccagattcatttgtaataaacagacggcatctgcaaagataaatccaatgagcttcttgtcttctagcctcctgccaaaaatgctgctcccgcctcacctcttgccctcgaggctctcattccctctcccagcttttggtagggccagacttccgctggaatgatcccctaaaacaacagcaggacctagagagtccttcttcaaagacggcacctagagtgatgctctccgagcagtgaaagacaggacccacgtcacaagcgtaccctctccagctccctccacagagaaaattactgagactcgcattttagacccgagggaatggaggccgagggcagcgaggcgacagctccaggttagagccagagacagggacctctccttacaactcctgtcctggattcaggaccctgggtaggaagtgattagccctgccctctcacctcaccctctcccgggatctccataacctagggcatcaaaagggagaagcacagagtcccggcatccgccgtattacagcggatgggtgcatgcgggcggtgacccgagctcgcgcgggctgcggaaccctccactcaccaacgccggcgccgccatgggcccagggggctgggtgaggccgtgagagtcggcgaggaagccggtcctgcgggctcggccgaccccgggctccggctctgggctgcgagggacctcagtccccgccgtcgtgtaaaatgcacacaaggttcgcggcgccgcctctgcgcgccgtgaggacacagggctgtcgccaaggccccaggaagggttttgcagacgcttgtgggggtgggatcgcggctgacataaaagcgtgtaagtgggtcctatcctcctcactgtccgtctctactcggtctcgaaaagtggcccctgtctggcgttctacccagtgtagcgttggcaaccacagcagccgcaacctaacggcggacgaagactggacgccggaagtcccgcccacgccgctacgggaacgcccctctgcgccttccgtctatggcttggggtcggcttccgtcccttgtagcactgccttctgggtaatgtagtttgacggaatccgggtggtacctggagcgcactttctgttctcggtgaggcggcttctcaaggctcccaagaaagggattggcttcacctcttcttaaaggagaggcacacagagttccgtggaaattatctgaggcaatgacccactctcaaatgtctctaccaggcaactcacgccttgactttcctccctgtgtatccctgcgccagcagttcatctctctgagccttgagatggagattcctaaggaaaatgaagataattatttaatatgataatattaaaatttcccctatcagtaattttcagatgacatcagcattacctgcgaatttgttaccaatgcaagttcttagtccccacccactgaatcaggtactctggggggtgggacccagccctctgcttaacttgtccaggaaaagtggatgctgcaaaacatttgagaaccagactctttaaattccagtaaataaatgagacaaagccacctgtttggtgggaagtaactaagaattgcttagcactgggcctggaacataccgataagaacataagagctattgctgtcattattaatattctgtattattggcaacatcatcacaatacactgctaggggagggtctgagatacttctttgcagactctgatatttgtcaaaacaaatacgttgactgattcaacaggagcctcatgaatactgtttaaattttacataataatacgttgcagcatttggcgtatgcatctttttaaaacggtatatgcaggagggtttcctaatatacaggtagacctattgcccaagggatactttcttacatgattcaaaacttaggatcactgagactaattacctgcagccctaagggaagagtggagttgacatggtttctagtttgtgatgtaagatggcgtgtcactgttcatctctaattcacagcaaccaggatctgacccctccccatctgcccctccagcccccagggaagccagaaccaggcacaaaccagatggcccagcttatgcccagcaactcagggtcaccagatcttgtctcatcaagacactttcagcccaccacccaaacctgtagcccacatgaagagggcaataatcctggacactgtgaaaagtaaaagcattacatccaaagaggcatccccaggatggagcagaaataagaaaacataatgaagacacaattttgcaatcacttctgcctatattccatggcctacaaaccactcaaatagctccacatgtaagagaagccaggatgtgctgtcctccagagcatccagaaagagataatgggactgataagtccttggccattttctagtaaaatctattaatttagtcatcagatttccattctattatttatcctatacattctacactctcacatgcttcttaatgcgagaagccaaaatctgcatgcagtctctgacctcatctgaatgttaagatctcagggtgatatgttatgcatctagtccagattttgggtggggatgcagccaaaccatataatattatggggcctgttgggaggtgactggatcgtgagggtagatttctcatgaatgatttgatgccatccccttggtgctattcttgagataatgagttttctcaagatctgactgtttaaaagtgtgtggcatcttcccctcactctctcttgctcctgctctcaccatgtgctacactggctccccctttgccttgcaccatgattggaagcttcctgaggcctcaccagaaattgagcagatgctagtgctatgcttcctgtacagcctgcagaactgtgagccaagtaaacctcttttctttgtaaattacccagtctggggtattccttcgtaaattacccagtctcaggttttcctttacagcaaagcaagaacaacctaacacatttaccaacttatgaatggataaacaaaatgtgatatatccttataacagattattcagccataagaaaagactgcagtgctgatatacaatacagcatggaggaacactgaaaacatgtaagtgaaaaaatcagctacaaaataaccacacagtatataattccatgtatatgaagtgtgcaggataggcaactctatagaggttgaaggtagattagtgattgcttagggatggtgggtagtggtgggacagccgattgatatctaagggatatggagtttctttgtgaagtgatgaaatgttttaagaataactgtgggggatagttgcacatatatttaaatatgttaaaaccactgaattatgtattttgaacgtgtgatttatatggtaagtgaattatatctcatgaaggctttttaaacaaaacaacactgctgtaacttagaccaaaccaaagtttgtgtcaaatcctgctatgtaatatttgttacattttatagtctaaaatctaagctttatttatgaggatactcacttcattgctgaggtgtgtcaacaaaacatattagtaaatttatacgaacaaaatattagacctattactgcgaaaatacaaaacttggaaataggaaaatttctttaaaaagaatcctatttagagtcaagggaagttatgaaacacatcaaggaaatgagtagttgctaaatattgagttaatatgttatacattccttctcagtgattacagaatacttatatcaaatgaaattagatgaaatatatatttgaaaggtaaacatccaaagtagaataaatttatcattttgtatcctaagtaatagaatttctttgttgcatttactttcaatcaacaaaataggtaagtgctttattgctactactttgatttatttcaaaacctctttgtacaatgtacaaaatgtaaatgtaactttaatgtaaattgtttttatataaattgtgactcaaaatatttggacagacaagttgtgtgagatgggctttaggcaatcatgcaatcctaactcatatttcatacagaattcatatattttatttacacatattcacttcacacaagactagggctaaatttaagttaatgggtttgattattattttcccacattaaataacaacactatttatatacacctcagggatattcccagaattttaaacatgggcttgcgattcttcagctcttgaatcaaacaaaaatgttctggagttttataaactaattagcaaggcagcggctgtttctattgaataattcactgctatttctgtgattctaataaatgattgcaaaaacaggaaatcacaactaaccaaattcctcacattattagtgaggaattagtggagccccaaagtggggctcagactgtgagggttcttggcttcacccagggaaggattcaagggcaagccagtggtagaagaaaacagttttattgaataggcagtgttacagctctgtgactgcctctgcagagcagggctaccccatcggcagagagtagcagctcagggcagttttgcagtcatatttatacccacttttaattacatgcagattaaggggcggtttatgcagaaatttctgtggaaggggtagtaacttttgggtcatagggtcactgccatggaaaggggtagtaacagccaggtgttgccatggcaatggtaaactgacatggcacactggtgggtgtgtcttatggaaagttgcttccacctcatccctgttttagatagtcctcaatttggtccaatgtctgaccatgcctctggagttgagtcttgcctcctatcttaaaacgataaaagcattatgaggaaattgtcaagcccaagggtgaggtgaagaattcttagatatgataccaaaagggacataaaggggacaaaacatgatcaatttttaaaatatttgctctggatatttaaatatatatttaaaatatatattatatatatccagagcaaatattttaaaaattgatcatgttttgtattatgtatatttatctatattatatattatatattaatatattatatattatatattaatatattatatattatatattaattaatatataatatatattatatataatatatattaattaatatataatatatgatatatattaattaatatataatatattatatattaattaatatataatatatgatatatattaatatattatatattaatatattatatataatctatatatctatattatatataatattatgtataaatatatatttatatatatcatatatataggatatatatactggatatgtataaaatgaaatattattcagcctttaaaaaatgaggaaatcctgccatgtgcaacaatatggatgaacccagagagcattatgctcagttaaatgagccagtcacagaagaacaaatattgtatgatcccacttatatgaggtatcaaaaaaagtcaaactcatagaggcagagagcaaaatggtgggcaccaggtctgggaggaggataagtggggagatattgaacaggtacaaagtttcagtatgcaaagtgaatatgttctagagagctgctgaacaacacagtgcctgtagttaacgatattgtatacttaaaatttgttaagagagcagatgtcaagttaagcgttcttactacagtaaaagggggggaggggagaggtaggaggaaacctttggagatgatggatgtgtttattaccttgattatagtgatggtttcacaggtatacacatatgttctaaccaaccaagttgtatacaataaatatgtgcaggtttttttatattagtgacacctcaatagagctgttaaaaaatctctgggacacagctgaaagacaatttgaagggaaatctataatattaaacacctaagagaaaaaatgaagggtctcaaatcatgggtcttagtttccacattaaataacaaacctgcaggttgtgcacatgtaccctagaacttaaagtataataaaaaatatatatatataagaaatcagaaaaagaaaagaaacaaaatgattcagaaaaaggatatactaaagatcaaaatggaaatcgatgaaataagcagaaaaaacttagagaaaatcaatgaaactagaagcttgagatcaatgaaactgataaacgtctagcaaagttttatcaagaaatagatgtctccaggtttagagacattttgttgcatgacattgccaaagtgagaatatttacaccagggaaattggcaaacactacaagtcagaattttgttgactgtacagcctgaaaaatgtaatggagaatatgttaataatgcagattaaatttaaaagtatgttgtgtctatagctttacattgtaaacagcacaaaatttgagaaaatattcttctagtatccaaaaatatttctcaacttagcaaacaagtcactaacaccattcatgaatgactgaagtactaacaaatttctttgttgtttcattgtactcttgttagtgaaaacagaaatatctacccaaccaacattcattttaaaaaggcaaaaaatatgaatggatatctcacaaaagtagatatatgggtggcaaaaaaacatacaaaataatttcccaaatcatgagtctttacagaaatgtaagatactacttggcacctcctattggaatggcaaaaattaaaaacactgacaacaccaattgttggtgaggatgtggagaaactggaactcaccaacactgctggtgagaacaaaaaatggcacaaccacttacatttttttcagtggtcttactctgtcacccaggttggagtgcaatggcacaatcctatactcaaatcctgaactcaagcaatcttcccaccacagcctcctgagtagctagctgggactacaggtatgtgccaccatgcccagcttttttttttttttttttttttttttttcattttttgaagagattgaggatctcattgtgttgtccaggctggtctcaaacttccaacctcaagcgatcctactgccttggccaccctaactgctgggattacaggtgtgagccatcatgcccagccctgacctttttccatagtcactacactcatgaaaactttcatcagagtgaactctctgatgtttactgaggctggggctttggataatttctcacatttgctgtactcataaggtttttctctggtgtgaactctttggtgttgaaagagatcagagtagtagctgtcaaatttaaccactgctccagatggaaaggcagggtctccaactcacatctcttaggagatgcactcataaggcctttctccaatgtggatttgctgatgctgagtaaatctcacttgctgttgaaagggtttaatttgctgcacagacttttctttagtgtgaactcgatgcatattgagagtggaggcctgtctaaagaattccccatattctctacacccataaggcctttccccagtgtggactctctgttgctaaacaactgtgaaattgtggctgaaggcatttccaagttgactgcattggtaatgcctttgcatgatgagaaaggctgctgcacatggtatgctcttctgtggctcccccatgctaagagtgacctgatgctggagaaagcctgctgtggctagaaagtccccatcctccctgcattcgaaaggctcttctgacgtgtggttgcttcaagtcttcacaagcaaggtcctcccctactcctttctgatggacttctctatattctctgcatctgttgctggggaaggtttacactcactcagaatcttctccacataccacatgtgtatgatgatttctgccctgggtgtgttatttggtatccagccaggtgcaaagtgtctttcaagagtagaccacatggccaggtgcagtggctcatgcctgtaatcccagcattttgggaggctaaggtgggagaattacttcaggccaggagtttgagaccagtctgggcaacatgatgagaccctgtctctacaaaaaaattaaaaaataagctgggtgtggtagtgtgcacctatagtcccagctacttgggaggctgaggtgggaggattgcttgagcccaagaggttgaggctgcagctgtaccactgcactccagccttggtgacagagtggcaccctgtgcaagaaagagaagagaagagaagaaattaaggaaggaaggaaaaaaggaaggaaggagagagacaaagagagaaagaaagaaagagacagggaggagggaggaaggaaggggaagcaaggaagggagagagagaaaggaaaggaaagaaagagagagggggagggagggaaggaaggaagggggagggaggaaggaagagagaaagcaagaaagagaaagaaggaaagaaagagaaagagaaagaaagccagaaagaaagaaaaggaaggaaggaaggggaaagaaggaagggagagaaagagaggaaagaaagagaaagaaagaaaggaaaagaaagaagaaaagtcaaagaaaagaaaagagaaagaaaaggaaggggccgggtgcggtggttcatgcctgtaatcccagcactttgggaggccgaggcaggtggatcacgaggtcaggagatcgagaccatcgtggctaacacgatgaaaccccatctctactaaaaatacaaaaaattagccgggcgcggtggcgggcacctgtagtcccagctactcaggaggctgaggcaggagaatggcgtgaacccgggaggcggagtttgcagtgagccgagatagcgccactgtactccagcctgggtgatagagcgagactctgtctcaaaaaaaaataaaaataaaaaaaagaaaaggaaggaaggagagagagaaaaggaaggaaggaaatgaaagaaaagaaataaagagaaagaaagaaagaagaaacaaagaaagagagaagaaagaacgaaagaaagaagaaaaagaaaaaataaaatcacacacatggcaggtgtaggttctgggtggaaggacctgcctgggattcctgacaggtgacactttttcaacactatgttcacagagagagcccttgcttaccttccaatctatgccaaaaaactgaaagcaatgaaatgctggtaaaattcttgttagcttgagtgggagagaacagccccatcacaaatgtctgacccaggaatgagcctgcggaattgttcgtaagacaaaggtgctgaggaagtggaaggaagcaactgctgcgcagtagtaagactctcaaagtgacagaatataggaggctttaacagtgccgtgatcttgccagagtcaagaatagcaggatgcagtgcagaaatgatagaggcagggtctccagctcacttctccataagcaccctccagcagggctttggctgctggtaaaacatgagccctaagggtgtgtccaggcccaagaaaaatgcaattgcacctgagttgctggtgttcagggactattaatggaaatgcacatctcacaacccatgaattgtaggctaatgttggagagcactccagagtgagcagtggagagggtgagacatggagaccaggatgtggggtgcagcctggggcccagtgtcagaatagaaatgacaagtggatacagtttcaagaatggggaaggagtgatatggatgaggtatggccattagctttggaacccaaacaatggtgaacagggacaggttactgatatgtgaacctagtcctgatgtcacactctcgtcttcctacttcccaaggccaaggcccctctaaccacctcttgtaatggttgtcatggtgtctgctctgttcaggcacccaggcctattccaccatctccagttgggcaactaaatggttgctaagcactaagggaagcaccttggcaggtgagtggccagcatttgttcagaggaaccactccaccacagactacaggaaagaaaatggaaaacaaaatgaaacaaaaagcctatgaggaatgtcttgcagaaacaagtcggcagtcccagccaaatagtgatcttcttagtgcctgtaattcctggcacagccaggccccaggaaatgccagccaaaaaaggggacagaatctgcacccagaattgccccggaactggacaatcatttgggaaagaaatgactgagctggatgggatctactgggctggcctcaaaacttccctgcaaggccttggggtggcagttgctggggctccttggggagggtactgctcagagaagtgcacagaggttcagcacccacagcacatgtgccaggacagcagagaagtgagaagggcccatgctccagctgtgaggacagagccgcctctggggcaaggggacaggaagaaaccagctcaggtcactagggaagatgtgaagaccttactcagcaaggctataaatgcaaagctgtccagcatcacattatggtataggcgtctctgagcctcgtcaaacagcccccacctgcctcagggaaaactcaatggccatatcctcaaaggtcacacagccctgccatgatggaggctattgactccatgactgtcttctctcctcaggacctcagtccatcttcccatacatacatcccaaacctactctcctccccaacttcccaattcagaggagatatcaggcactggtgacactggtgttcactcccagtttgtaccctgttgatcactgtgtcagcccacattgacaacaggcaggcaggcagatagacaccaaatgtactctgggcctggcatgtggggtcttttaaaatgcacctgggatttgttttaattaggtgtagtgagatgatgtacagacaactgccattgaaagaagattttcttaacttacagttcccaagatcccaagaagaggggccatgccacgccatgcagggctacacagggaaggatcagggtcagagaggaggcaggaagagcaaagagggaagcaggggcaggaggttttattgtggtttcacagaaaggaagaggcaaggcagggtaggtaaactgagcaggctaaggatcgagtaatctgaataattttagtaagctctgggttatatgggtgctccttagttgtccagtacctggccctggagtgatttagggcagggggacagtgtcctgggctgcaggaacctgataaaagcaggcaggtaggagtaggaactcagactggttggctatacatgaatgacttacccacaggcaagtgtttattttctaggaattagctggccctgggaggggtggtctcaccaggatgagcaagcccccaatatgtcaaagcatcagaaaatatagaaaatattttttaaaaaaacatccccttgtgatcaatacaaggggcccaacgccatctcccagtgtcagcaagatcgtacttaccagatacaaacaaaagggctcagtcttcttccttaacctcccagtaccatgggccagtcattaacttccttcccacaggggtagcactcttcagactgcacctgcctcgtaactctaggccccacctgtgaagccccaattgccgctgctacccaactcctggcccacaccatggccatgttcataggctttccacaattccctctgtacatggcatgcaaagagtgcttggcaaatgcaaccaggagctcatcctgcccaagaccccctgtattcatctcccagggttgctgaattgggtggtttcaaacaaaagaaattgattatctgacagtctagagctagaagtctgaaatgaagacgttggtagggccatgctgtcttcagtagttccaggggagaatcctgccttgcttcttccagcttctggtggttgctggcaatccctggcattccttggcttgtggatacacccctccggtcacatggccatcttctccctgggtgtctttatgtcatcttctctctgtgtgtgtctgtctcagggtccacatttcccctttttataagtataccagtcatattggattaagatgcaccctcgggatctcattttaacacgattacctctataaagactctatttccaaataagatcgcattttaaggtactgagtattaagacattcacatatattttggggggaatacaactcaaaatacctttgatggctcccactggcaagggcagcgcccagttccgatttgaaggcctcccaacatggtggtgatcctggcttcaacctcagtcattaaccacacacagatgtttgacacttattaatagatcctctttctcttctgtgttgtgcattctattccttcatcaccatgggtcaccacaaaagcctagtgtgtccagagactggtgaataaactccatcccagatcttactgtaattccacctccattctggctaagcctcaacatccatctcgaatcgatacccccttggaaaatgtggccacttaccagatcctgatcttccccatatgcaatcctcatggccagtgatttgccgaagcaagataaccagtcctcaggctccactctttcctttctttcaacatattggcattgcaccatgaccagaaaatctcctctcctaaatctccacacaactccatagccatccacatactagatgccacaatttggattctcataacccgaatccctccccagcacaccacaactgtatgtctagttgcctgctcagaacctctactcaggggcccctggaccgtcagactcaacatggccaaaacctaacttctgatacttctgatactgccacttaaaatctcccctacaaccaactattccatctcaattggtggcacatctgtcctttccagctgctaagccaaaaacctggggtcacctaacctccttgtccttcttacccttcatgttagaaaatctggtcagcttgacttaaaaaatagatgcagaatctaatcactgcttccatatccattttggtttagcgaacaccacttacctggactattgcagtagcctattacttggtcactctgctcccaccgtatgcctctacagcctgctctcctctctgcagccagagggaccctgttaggatctcagtaagatcacctctctgctctgttcccaaccttcagggctcccagaacattcagaagagagacccactcctcactcaggcattccagggctgccttctgccccctgctctctggtaacatcagtgactccccagtgatgatggaaaggggaaaagtctcagggaaatattatcctttgtatctcagtgccaagaacttgagagtggaggtctgagcagctgaggacctaaaggcccttccacttacctgcactggatccatcaatgccaccatatccagtgagcaacatgaacagggtgggaatgtgagaagcgggagactggggcaggtctgatgggctcaacctgctcttcaatttggtctgtgctgtggggggtgtgcccttgtcagtaaaacattggaacaatatttcccagggccaactggaatgctgtttggccattgtcatggagaaacagatacaggtcacaactatattacccagttatagttgggtgctccaacttgggtgctccaagcctcagactccaccagtataaaatacacgtaaggcccaagatatcatgggatggagtgagggtgcagtggctctggaggatcctggcagaacccccatttcaggaggatcatagctaatgcaaaggggtggaggtaggtcctaacctctgcacagtccttccctgctcagtgctgacaaagatcttctcaaccaaactctaatcaggctcctttgaactctctcctcacctaggccctgatttggatttccatgttgtctctacattgtccatttttagcaagaatcctgctaagtcagcttaccagaatccccccttacctctgacatttcctcttagtgcttttccatttattgacccctccacaccattccttgggtatgaatccccacttgttcttgctgcagttggagttgagcccaatctctctcccaccctagaacaccccgctgcagtggtccctacatctctcgcaagagtcccgctgaatcaagtctgccttactattctttaacaagcgtcatgatttttttaacacctgggaattgacttggcccctgtggagtaacccagcaccaccaactaaacattcacaatggtgtcttgcaaagcccacagcgcctatgtggggtacaggaagtgcccctttcctgggtggaggcacagagacttgtctgggtaatatagttgtgacctgtatctgtttctccatgacaatggccaaacagcattccagttggccctgggaaatattgttccaatgtcttactgacaaggcagggcttttcttcctcctaaaggagccacatctagatttctgtggccacccaagctgatgctccaccctcagaggttgctaataggagactcattccttgaccttcctgcctctgaggccctaggtgcatctcttcagttctaggcactcaataacctacattcaaaatgaaaaatgaagaaaataccatgcttttagggtctttgtgtactaacattaaagactgttctaatccagtagttcccaaacctttaacattgggaccacctgataattttttaaaaatgcatgctccctggccccaccaaaacctagtgaatcagaaactgtggggctggggcccagaggggaattttgatcctggctgcagtttgagaaagggaatgctcattaaaatccagtgaataaaataggtaaaataacaccacatacctcatgggaagtaatagagctttgcacaggacctggcacaaagtcagtactcatgaaatgcattacggctatttttatcatcatcatcatcatcatcatcatcatcatcatcatcatcatcatcacaagacactcacatacaatggctgtgagggggcaaacgaaatgtcccttttgctgggtcatttgggatatctgtcaaaatataaaacatcactcaaatgcatcaagcagcctcagagttaatcactgaaagttttacaagatagtacacctttgaataacactatttggctcctttaaaagaatttatttttaaaaatagatcatgcaggagggtttcataaactgtaggatgaattcttataggccacaggattcaacgcttgagaacatcacagctaattgccctctggccaaagtggagagtggagttgacacaatttcaagtatgtgatggcagatgacaagtcattgttaatctctaatactcagggaattcacctccctccagcctctaggtgcaaatatttgactatgaaatggcacagcctgatgtttactgacagaattatcaggtactgctctcatcaagacttcaacagcccattacttgaacctgcagtcctcaagtgaataccaaattaattaagtcttaggaaagccacatatccaggaagagaaaggggattcctaagcacctactcagtttctagcacaacccatcaatttggccaccagatacatactcattacagtcggccctctgtatccacaggttctgcatccatggattcaaccaactgtggattaaaaatacttggaaaaaatggttgcctttgtactgaataagtatacgcctttttttcttattattccctgaacaatacagcatcacaactatttacacagcacttacattgtattgggtattgtaagtaatctagagatgagttaaaatatatgggaggagtctatgtgtaggctatatgcaaattctatggcattttatattagggacttgagcatctgtggatgcagtatctgtgcaggatcctggaaccaatgtcccatggatcccaaagggcgactgtgtatgatttctcctccacactcaatactcttacttcctcttttctgtgacaatcccatccagtcactgtctccatctcagtgttagaatttcggttcatatcctaacctaagatctgaaggctatgatcaaaatggtaagatatttgtcaccactcactcccaaaatataattgtgactcagggacacagtgaaagggaccaattcaaactgctgaagaagtaactgctaaccaaaatttctacacatagcaaaagtgtttttgaagaaacagcataaagcaaaatgacttcagagcaaaaataagaaatttaatggaaaattaacctgcataaaatgaaattcttaaagaaaattctatttaaggatgacaaaaagtgataccaggtgaaagatctgtgatgagagaagaaatgtggatccagagagaaggcacatctgtggattaaaaaaatactcattatctgtagaaaacgtgacaaatattccactgtgaagttaaaaagatggaattatcatgtatagcctcgataacatatatactgagatgggataaaatgattaatattctaagactctttttaaaagtattaacagataaaattgtatatatttgccatgtgcaacatgatgttttaacatgtatagacattagaatgactaatctagctaattaatatattcctacctcacacagttatcattttgtaatgagaacactttacacccaccctcttagcattttttaagaagactatatattattaactatattcaccatgttgtataatagatttcttgacagtattcctgctaactgaaattttgtatcctttgagcaacttttccacaaagctcccatcccctagtgaccattctaccctttactcctatgacttttttagattccttatatgagatcaggtaaaatttgcttttctgtgcctggcttatttcacttaacacagtgtcctctaggctcatcaatatgtgccacattttctttacccaatcatatctcgatgaacagttaggttgttcccatagcttagctttcatgaataacattgcaatgaacatcagattgcagctatgtctaatgggttaatttaatttcctttgtgtctatgtccagaagagggactactggatcacatggtaattctatgtttacttttttgagaaacttccatactgttttccataaccgctttactaatttacattaccaccaacagtatggaagtgttccctcttatccacctcctcgccaacacgtgctcttttctctttttgataacagccattctaacagaggtgaggtgatgtctcattgtaatttttatctgcatttccctaattattagtggtgttgagcattttttcatatagttattggtcatttgtatgtcttctttagatgctaaatgtctattcaggtccttcccacatttttaattgagttatttgttttcttgctattgtttcagttcattatatattttggatattaactccttatcaaatgtatagcttgaaaatattctctctcgatctgtaggttgtctcttcactctgttgactgtttcctatgctgtgcaaaacctttttagtttgatgtggtcccatttgactatttttgcttttgttgcttgtactttgggggtcatatccaaaaagtcgtggctcagatcaaagtcatggagcatgtcctctacattttcttctagtagtttcacagttttgtgtcttatatttaagtctttagttcattttaagtttatttttgtatatgttgtgagataagggtctaagttcatccctctgcatgtgaatagccatgttttccaacaccatttattgaagagactgtccttttcccatggtgtgttttcagtgcctttgttaaaaatcaattggctctaaatgtgtggggtttatctctgagctctctattcaattaacgatagcttgtcacaaaaggctttctgacatgctttacattcaaaggactttcctccagtgtcctatgatgtacccgcactgtcatgatcattgtagcattattcacaagcatcaacctaagtgtctgtcaatggatgaatgaacacaggaagtacaaagaatgaatgaatacaggaaaaaatgaatacaaagtgaaatgaatacagaaagacaatgaaatattaatcagccttaaaaaaggggggaaattctgtcatttgaaacaacatagatgaccctggagaatattacaccaattgaaataagttaagcacagaaagacaaacactgtgtgatctcatttatatgtggaatcaagagaaattgaactcatagaagtagagagcggaaggcctggggggaggaggagaggaagattagggaaagatgttgatcaatggtgcaaaatttcagttagacaggaggaatacattttagtaatctattgcacagaactgtgactataacaaacaatgtactgtatatcttaaaattgctaaaatagtagattttaaatttactacaaaaatttatattatatatgaggtgatagatttaattagcttgatgtaatccatccacattgtaaatatgtatcaaaatattatgctgtacccccataaattcatattatttgtcaattaaaaataaaattaaaaataaagaagttggagataaaaaagaaatgtgttattattattcattgcagttaatgttattacatgcacaataccaatacaaatagctaagtcttttagagccactgtgtttcaggcattaccttatacagttccatatattatctaactataccatcagacaatccaatgagatgaaaagtattgaaaagtcttattaccaccatttactaaatgtaggctaagtgtacagaatgagatagatgttgaccaaacccattttctctcctctttgggtacacagctataccacctcctggctctgagaatccaggtgcagccaaatacccagtttttgtcaacagagtggcaacagcaatgtatgggtgcaagtgggcatgacttctctttctcatttttcctctgctgacagataatgccaagaaagctttaaattgagccacatgttgacaatagaatgtttcttattccctgaataactgtgtggtgcagagctccttgctaacctgtgtggacctgtgtggatcttgaatgaggaaaagaaaaagacaaaagccaaaaactctccttgtgctgggctgctgatattgtaaagtgtttctgtgttacaatagccagcattaacttagccagcttttacactgatgaaatcatgcaacatctcacaaggctggagagtggcaatgtcaagtattaagcccaaagacatggaacttagagtttgattttaacctaatacaacctacttctcccccagtagcagggaagtgtataagggggtaagaggatggtcaaaggactgtatggatcccaagtccccagggaggtcacaacaagaggcttcccccttcccaaaaagaggtccccaattgatctacggagttcagggactcccacctgcccagctcttggtcacctacctggacaggaactttatgagaggcctctcttcaccacacaataatcttgctcattttccatcaggtagctcagttccaattttggaagaagataccctgatcatggagaaataggacagcaatatttgggtaaagataagaatgacgctctgtattcagtatggtgttcaagacaagaggaggagcccagaatgaggctgctcccttccatgcaaagaaaatgttgacctgtaacctggaaaccaacagcacaaaaactatccttgagccaagagtctatagagggttgtgatgaccatcaatgtaacattcatccccctcaatctccatcctacagaatccaacactgttcatgggcaagcccttccccctttaaatacagccatgggaccctgggaaagtgacatttcataacagaaactattttctaattaacttaagtcagtgggtctcaacctccctgaacaaaagaaccacctggggatgccttgattatgggccaaatggaacaaaatcccgggatgaagcatggacatgagcagctttaaaagttctccaggtgctcagggaggattgaaaagtgtgggtctaaattgactgatgcctgactttctgctctgtttctatgtttttggaaaatgttgggagttctgctattttggagctatgatttttgagggtgcaagtgaggtaaagggaatctgtataaaccaaggaaca[139 bp omitted]cggtgaaaacccgtctctactaaaaatacaaaaaattagctgggcgtggtggcgggtgcctgtagtcccagctactcgggaggctgaggcaggagaatggcatgaacccaggagacggagcttaccgtgagcggagatcgcaccactgcactccagcctggatgacagagcaagactctgtctcaaaaaaaaaaaaagatattaatcctcgtgctatgaatctcacaaacaggataccaagcgaaagaccctggacaaaaagccatgcatgccatgtgaatccatacacataaccttcaagaagaagccaatccaatgtatggggatggaagtcagcacagtgacgccttttgggggaactgactgggagatgcagggggagcctgctggggattcagaatgcctgatagctcgatctagtggaagttactgtaagtggggacacagattaaatatgaattgaaatgaacacttaggactgaacattttgctgaggtatgccttatggtatacctcaaattaacaagcatattaaaacaataagtcatgctcaaaaatgttattgttctctttgggcagcagcttcctagagggaagccaattgggtctagagtcagcagctttggggaaaagcccacacttcaccagggatgttgtgagggctaatcagtggagcagggagagtgcctggaacagggcctggcatagggtcagtggtcaggggacgttggctgtgaccattagtataaaccactattctttaagttgacacacattttgtttacttgaattggtttcttcataaagggaatcttgtattgcttataaatgggaaaactagtttcacttttcacaaatcagtttccatcaaaatacaacaatgaaataaaaataatgctgtaagttctggtaagcttatgtggcccaccctgtgcttctgatgtaggtgaaccccagaattggggcttggcccaggagggttcttggttttgtgctggaaagaattcaagagcaagctgacagagcaaagtgaaagcaagtttattagagctacagagggcaggaaaatggctgctctgtagcagagtagtagcagaagccctcgtggattgctggctagctatatttatggctattcctgcattatatgctaaataagaggtgggttattcatgagttttctgaaaaaggggtggaggttccagtaactgagggttcctccctttttaaaatcgtatgtattagtcagttttcacgctgcagataaagacatctccaagactgggcaatttacaaaagaaagaggcttattggacttacagttccacatggctagggaggcctgacaatcatggcagaaggcaaggaggggaaagtcacatctcatgtggatggcagcaggcaaaatgagagcttgtgctgagaaactcccatttttaaaaccatcaggtctcgtgagacccattcactatcacaaggacagcatgggaaagacccctccccgctgccccacgattcagtcatctcttactgggtccctcccacaacatgtgggaattataggagctacacgatgagatttgggtggggacacagagacaaaccatattactgtataaggtggcttctgggagttgcatggcatttgtaaactgtcacggcactggtgggagtttcttttagtatgttaatgagttataattaatgtacaatgagcaacgagggcaacatcttggttttagctggttttggccagtttctttgctacatcctgttttgcttagatactgttttgatcagcggggccttgtgactggtgctcagaaaacaagtcccactgatcttcgacctcattcccccctcagagattatatactcctccttaatctttttttttcttttttttttttgagacagagtcttgctctgtcacccaggctggaatgcagtggtgcaatcttggctcactgcaacctccacctcccaggttgaagcaatcctcccacctcagccttccaagtagctaggattacaagcatgcatcactatgtttggctaatttttctatttttagtagagacagcgtttcaccatgttggccaggttggtctcaaattcctgaccttaagtgagccactggcctcagcctcccaaagtgctaggattacaagggtcaatcaccatgcctggccctccttcttaatcttaaggggttgtagaagggtagaggtccatcttctgcaactgcttcttgctgatcttatgggcataggtcctgcctagctttgaaggagtaaaaatctctgaatacctgatataaggggcccaaagcaggatgtctttattttctgggtcagaagatgggatgggttggaagccttgtgacatcttcacatggaatttatgtaatctagaagacacagactttactaagaggttaaacaagcaagggccaaagatcagtggtaacagagctattaaaggccatagtaagagtaaaaaccatgtcgtacttggtaggtatcctttgatggagtctcagatggtttgactggtggggttagtaaaattatgtagccaggtggcctgctagtaaatctttatttttcttttttgagacaaggtctcactctgtgacccaagctggagtgtagtggcatgatcatgctcactgctgcctcgatctctcaggctcaagcaaccctcctgcctcagccttccaagtagctgggaccacaggcgcacactaccctgcccagctatttttttaaatttatttttcatagagacacagtctcactgtattgctcaggctggtctcaaactcctaggctcaggtgatcctcctaccttggcctcccaaagtactgggattacagatgtgagccactgtgcttggccttggcagatattttgaacttgcagttcaattatccctgaattgttaacataagaacaacaggtatgacttactaccacacatactcctcattgttcagccagaagatagtctagagccaatctgctgtctaaggcaacattggctagggagtacagggaggcctggagtccacttacggcttttcctatacttcctgcctgtgtttcaagggtttgagtacttatctgtgcattttcttttctttttctttttctttttgagatggagctttgctcttgttgcccaggctggagtgcaatggcacaatctcagctcaccgcaacctctgcctcccaggttcaagcgattctcctgtctcagcctcccaagtagctgagattacaagcatgtgccaccacgcccagctaattttgtatttttagtagagatggggtttctccatgttggtcaggctggtctcgaactcccgacctcaggtgatccgcccgcctcagcctcccaaagtgctggttttacaggcgtgagccaccacacctggcaatctgtgaattttcaaaacaatagctttaagtcttctagggtttcacagtgtagctcttggtgtcctcctcttgtgcctgaggggactcataagaaacaggtttatttaatcctggacaggtatacccaactagtgattctgtgaagtttaatagcagtgggggtgttcaacaatgcctaataggagcccttcaatttttttttttttttgagatggagtctctctattgcccaagatggagtgcagaggtgcaatcttgactcactgcaacctccgcctcctgggttcaagtggtcctcctacctcagtcttccgagaagctgggattacaggcgcctgccaccatgcctggctaatttttatatttttagtagagacagggtttcaccatgttggccaggctagtctcaaactcctgatctcaagcgatctgcctgcttcagcctcccaaagtactgaaattacaggtgtgagccaccatgcccagcctttccaagtttttaagagggctaaatatcctgggtgaacaggggagccattcttttcctctgtgggaaagggcaatgctttatttccatattcttggagagctttttgaacctggcccaagttgatagtatgagtgagcattttatgtctcctcatcaaacaggaggtctgaagttaaaaagggcctcccatagttcatttcaaatgggctaagatttaagattccctttggaactatctttatgcacaaaacggctatgggtaggagaggcccccagggtctctggacaaagttttgctgacgtccttttaaaaacatggttggcatatctccaaatgctatccctcccccctccctccaccccacaacaggccccggtgtgtgatgctccccttcctgtgtccgtgtgttctcattgttcaattcccacctatgagtgagcacatgcagtgtttggttttttgtccttgcgatagtttgctgagaatgatgatttccagcttcatccatgtccctacaaaggacgtgaactcatcattttttatggctgcatagtattccatggtgtataggtgccacattttcttaatccagtctatcattgttggacatttgggttggttccaagtctttgctattgtgaatagtgccgcaataaacatacgtgtgcatgtgtctttacagcaacatgatttataatcctttgggtatatacccagtagtgggattgctgggtcaaatggtatttctatttctagatccctgaggaatcgccacactgacttccacaatggttgaactagtttacagtcccaccaacagtgtaaaagtgttcctatttctccacatcctctccagcacctgttgtttcctgactttttaatgattgccattctaactggtgtgagatggtatctcattgtggttttgatttgcatttctctgatggccagtgatgatgagcattttttcatgtgtcttttggctgcataaatgtcttcttttgagaagtgtctgggaacatctgtatgcagaagtacagtatacagagataagaatttacaatatagtgtgtgcatcagcaatttctaacagagccttaaaacagaaacacagtctatccataacctatatttagtaagatactaatcagtagtaataattgcagcaaaagctgattgcaaacaatcaatagaagcaggatgtgaaactagacaaccagttagaccacaaaatctcagaagggagtatgtcttaaccctaaagagacctagaagagtcgtggcaagataagggtgtttatagccctatcttatccgtatgaacaggcgcccccatgcatccatttataggctctccacaagggtcgcattccattcccagagctatgaacatctgcttttctgggataggaatcttggtgatgtgaaacctccctgactccacgtcggtttataggctctctgcagggggaaacacatcatgtgctgttggctcattctggcagtcccacctggcattgtctttacacaatcctgcatgcaattttgtatttacaataatcaggagcatttcatcttttattccatagcaatagtttcagggggtctccctacaattgtattagataaatgcgttacaatcaagatttaggcatcagatgtgctcattgctactggggtacaatttctttgaggccttctcagcgacagagcaaagaaatgtatgtgtatatactaaccatgcatatgccatctgtatctatattaacttaaacatgtattcttactgataattccaactctaatctggtaccacagagatcattctagcatcctccccttgctaatctataaattcctactccaacagtgaaaacctggctcccactgtccagcatccatttatttaatagttcaattccagtatacatgtatagcagtatcagaattgttcatctgtaccctcatgtgaaaactttatcaactagtgtacactgcatatttgtagttcattttgcctttagtcttacagactccattcatttctaaagttacttaggtcagcacctttccctctactccctctgtgaagttgcctcatacatttgtaatacagatagatttgcatgttacagcctaaattattttctgggatccttcaacctctgaatttattacattaatttgcatacattaaggttcactctgtgttggacaggtctatgagttttgacaaacgcaaacagtatcattgtagcctcatggccataaaaatcccttgcatttcacccattcaaccctcccccaatctcctggcaactattgatcttcttactgtatctgtagtttgtctttcccagaatgtcacataattggaatcgtactatacacagcacttttttttttgagacagggtctcattctgtcacccaggctggagttgcagtggcatgatctcagctcactgcaacctccacctcctggactcaagtgatcctctgacctcaacctccggagtagctgggaccacaggcatgcaccaccccatcctcctaatttttgtattttttgtagagacggggttttgccgtgttgcccaggctggtctggaactccatagctcaagtgatcctcttgcttcagcctcccaaagtgctgagtttactggcgtgaaccaccatgcccagcctcatactatacatagcattttcagactgacttctttcacttagcaatatgtgtgtaagaattctctgtcttttggtgtcttgatagcccatttggttttatcactgaataatattccgttgtgtggatgtacaactggtttttgtttcctttttatccattcacatacagaatgacattttggttgctttcagtttggggaaattatgaaaaaaatttgcaatagtcatccatatgaaagtttttgtgtgaacttaagttcaaaatatgaagccctaaccccagtgtgactatatttggagaaagggcctttaaggacctaattaatgttaaattaaataataagtgtggtgctctaacctgctaggactcatgtccatataagaaaaggaagagacaccagagattgaggcctccccttttcctttctcttccctgtctaccccacagaaccatgtgaagtcacggcaagaaggcaactatatctgcaagccagaaaaagaggatagagggccaagagaacagagctgctgttatctactgaactgggggagacacaattcagttggtaacaatggctacaccactttgcattcccagcatcctttatagagttcttccactctacatacttgtcagcatttggtattgtcagtttttaagattttagccactttaatagatgtgtaggctaatgtcttgttaatgtcttcattatattcccgaatgacatatgatgtgcatctttacatatttatttgccctgtgtatgtcttctctggtaaggtatttgttcaggtcttttgaccatttttcagttgggtcgttttgttttctcactgttgagttttaagttgttcacctcacatattttgatgctttgttatgtacatacacattaaggattattatatcttcttggagaattgacctctttatcattatgtactgcccctctttacccctgaaagtttccttgctctgaagtctgatattaatatagttactcctgctttattttgatgaatgttcacatggcatatctttctccaccccttaacttttaacctaccagtatctttatatttaaagtgaatttcttgaagattgttgggtcttattttttattcaatctgacagttcagatctttaatttgtattaagtttctactgacatatcttcaagctcattgattcttttttccactatgtccagtctactgatgagcccttcgaaggcattcatttgtgttaacaatgttttttatttctagcatttcctttgtttttttttttttttttttctttttttgagacggagtgtcgctctgtcacccaggctgcagtgcagtggcatgatctcggctcactgcaacctctgccccccgggtccaagcaattctcctgcctcagcctccagagtagctgggattacaggcgtgcaccactacgccctactaattttgtgcttttagtagagacggggtttcaccat[133 bp omitted]tctacttatattacccatctgttcttaaatgttgtttacgtttttccaatagagcccttgctgtatattcatcagttattttgacccaatgtgtttttactacttttatcagtccttccacctctgtgtggtaaacatgagcaccttctccatatcacagtcagtgatctgaggaagttgtccagagtatctcagtctagtgagcaggggcaggatttgaatgcaggtctctctggtccatggtttatgtggataaacctcatactcttccactatcacagtaacaaggatgtgaagcatttctaatatctgttgctcctaaattcatttaatccatccctgaagatatttctgtgtacatggacagagaattttccatttttgctgcattaataagacctttctccagcgtgaattctttgttgttcagtaaaactggaactttggctaaagaatttcccatgttccctgcactaataaggtctttctccagtgtgaattcactggtgaggaacaagtccatatttgcagctgaaggttttcccacattcacagaactcataagccctttccccaatttggactctttggtgtttgacaagtaagggtttgtatttgatagctttcacatatgtgatacactcataaagcccttctccactgtggactctttggtgctgaacaagtgtgtgtttgcagtttatggctttcctgagttcactgcacttctcatcactttttcactgtaaatggctgccccacactcagtggtgctgtatggcttttcctgttgtaagtggcctggtgctggagaagtcctgagtcaaccaggaagtaccttccaaccttctcaaaggtaaaggacttatttggcacaagaaatctgcagcccttcacgaaaaagctcctatctacatcccttctgaagggtttctctttactgaaaggatcattttccacatgcccctaagtatacagtttcttcctgggatattttcccctgtcctcagcaaaaggcaaaatgtctttcaagattaagacatacatatcacaggggtgggctttctgaggaaagggcctcagggggctctgacctgtgacaattcttttacagaaaatcttggctgagaagatgcttcctcatctttcacttcatgccaataccctaaaagcaaagacatgccagtgaagtgcacgtggactttggtgagaaggggcactgacatcacaaatgtgtatctgcacaccaatgcatgagtctatgtgagttcacaggactgttttcaggaggagagagtttgggtcagactgaggaagcagctgttgtgaactcatagttttcaaaaagtcacagcatgggagaagcctcaccaggcaaaggacacaaggatgaggtgcagcacaatgaggaggagtggggtctacaactccctcctctgccaatggtttttggtacttgtatttgctgatgacacaagaggtgtgcagaaaggtatgtccaggcccaagaaaatccaatggcaaaagagtggctcacgttcagagactacttaagaatatgtgtgcatctcacaacacagtatgtgtgggccagtgttggagaacactgtgagagggagtagtggacaggagtaggtaagatgtgcaatacagagagttggggattagccctgggacaaaagtctgactagaaatggcaagctgctagtgtcaagaatgggagaagaaaggtagaaatgaggtgtgaccactggcattggcaccaaaatagtagtgggaacaggactggttcatggtatgatttgaacacagccctgatgtcatgccctctcacctgccacttaatagggccaggacccctctgagccgcatgtccccactaagaagcacccatagctcttccccctgctcccagctgagaatagtacctggataatgcaagaactaaaggaaaaactgaagaagggaggagccagcactggcccagggaaacttggagcaacagactacaggtaagaaaaccaaatgttacaaaaacaacctcagaggaggacataaatagtgaccatgtcggtaacagcaattcctggtataggaagacatggggatatattagctagaggaagggggcagaacctggggcggagaggtcacctggccagggaaagggaaaagtgggcttataaaggctgacggcaagactcctgatccccttcccagtaagcctttggggcagcaggtattgaggctgcttgggaagaggataggacagtgcaatggctcagccccaccaaccagtgaacctacccaggaaactgaggaaggaagtagagtccattgtcctaatgtgagaaggatggatctgtccttggggaaaaggaaaggcagaatctagtctaaagtatctgggtgggtgtgagggtctcacccattgaggccatcagtgaaaagttctcagcatcacactgcagtataggagtttcggaacatcatcaaggagactccattccctccaggagaagtgcatggccacttcctcaaaggtcacattactctgttatgatagggacagatgaaaccatgaagagcctctcttgaggacccccagtacatctttctataaatccaccccatattcatactccttccaagatccaaaacccagaggatgtatcagaccttggtgtcatttgtgcctactccctcctatcacccattaatcgctgtgtctgtgctcaacaataagaagcaggtgggcagacagacaccatttaagttccaggcctgccacgcagggccccaccccttcttgccaagaaattaccaggaagtccctagatggtaccttccaaacacaaccaaacttgggctcactcttcatccttaagtcccaaataccagagccctaggacacactccctctccatgtgcacatcattctttaggctattcctctctcatatctccagatgtcatagatattgctatcttcctatcccaaactatagatccctccctagcctccccacatgctactcaccacatggcatcaagaacatgcctgacaattcagacagaatctagtacttccccaagacctccaatggctttcactgccaagggcaacccttaatcctgctaagaaagcctcaccttctggctgtttcatcagtcaatctcagccatccagaacaacatgcaggttttagatacctccccgcaaactgctgccctcctaatgcctctagcagacaaccacatttgcccctgtgctaatccactatcctggcgagtccgtagagctgtgaagtaaaggccctgtccttggtgccatctttcttcaattactcctatgcttctgtatccacatgaatgtctattcttctcttagaagccctggcctcctgccagaccctcttttccccagacccaaccttcaggctcagttctctcccttcagctgtgcctgtgatgcccaccacacccaaccaggtgcccaagcaatagatccagtcctcggccctcactctccccttcttggccagctgaaagctgaagatcatgacctgaagatttcttcttctaaatgtgatgcacagcttcacctcaagtctacaaagtggccaccaccttctggatgtctctattctgaatgactccctagagttccagacctttgtgtctaccagtccacttgatgtcttcactcagtgttctctgaaatatctcactcttcacatggccaaaacaaaactcccatatacccactgaaaattacttttactactaacttctccttcatttctgtggagtcttaattaggcaaaaggaatcaggctggcaggacgaggagaaaccgaaaagaaaaagcagataagctccaagtctgcctttcttcatggtccaggacacacagccctcctgcacaaataactcacaatcttcctgtgcccacctatcaccagacacctgcatgctagctcactgcaaccatagtgttatcggtattgcacaaaaccctcttcagcacacagcataaacactatcctataaaatctcaagcaagcctttgtttcttggcagtcagcttctcttctgctgatcctgcctatgggcaacatatcttcctactttctctaataaatctgcctttatttacctacaattgtcttggtaagtacttttactgccacaccactggcccagacagtcactgctcacctatgacacttccttccaaaactttggagtaatccctaagtgctacctttttttttttttttttttgagacggagtctcactctgttgccaggctggagtgcagtggcacaatctcagcctgctgcaacctctgcctcccaggttcaagcaattctcctgcctcagcctcccgagtagctgggactacaggcacgtgccaccacgcccagctaatttttgtatgtttagtagagacgaagtttcaccatgttggccaggatggtctcaatctcttgacctcgtgatccacccgcctcggcctcccaaagttctaggactacaggcatgagccaccgtgcccagctgctacctttttttctctcaccctcaacattagaaaatccagcattcagccctatttttaaaaaaggtctggaatccagccactttctccatttccagataccaccaacacttacttagattattgcagtagccccatccatgatcttcctgcctcctccctcactctcaaaatttgttcagtctgcagccagagggagcctattaagacctgagtcatgtcacctcattgctcctatgccattgctcccatcaactccagaaaccacccaacttctcagactgccattccagatctgacccctactctcctgctagcaagaaagagaggagatctgtgattctctgaacactcccttctaagccttaccttcaagcatttggagatggtggtacctgtgcttaggataaccttccacacctcatcctattggttgctagatatacataggaactattatatatactacctctggccgaggaccctgggcttggggtttctcaagcaaccccagtctcaagggctagaagagtcacacacaggctgagtcccaaggcaccacaatcctatagccacgtggatggaaggttgggaccagtgagggctcactcacctgtgtatgatccataagcacttttgtggccacaggaacctgtgggaagaggtagaccttgagaagcaggcaactatgggaggactccatgggcttaggcctctcttgaacatctgcccagtggtggaaacaggtgaccttggactgactgtacaatctctatatttcagtcctcaataatgccttttacctgctttgtaactttgaacaagtactcaatctccctgtacctcactgtccaacttgcacctcatccagtcttcttcctccaagcagcttttgggaaactttaaaaccttaactcagactgtgttcctcctcagttcacaaccctgcatggctccaagcaccatcagaaagtgaaaccgtgccccaggggtagagaatttgttaactagcaaaatttcctgaacttgttttgcagaacagtagaaaagtaaatagtttcccacagtcccctctgtttgcaacaaagttggctgatgagctgagactgcttgggaccaatatggctgactggagtctgcacagaatagacttatcagatgagtgaccttttgatgttagagggctgaaaacacctccagatcatgctaacaccatttcctgaacatatgacccataaagcagcatgtaggggcaacagtccttgcccaagggactctccaaaccgctttgtcttccagccaatcactgtccagcccaaaaccccaccctcaaaatctctccctcaaatctatggcggccaagctggtacaaggagacagactggcctcctgcctccttgactcttagtaaacctttattgctgcaaaaacccaatgctttggtgtttgggtttctggtgtttgactttcctttgtatatgggcaaatgggcccagtttggttctgtgacaaatgaaggtacaacaccttgtcactgcaggtgtgacttctcttcacactctactctgtgtacacacagcccccaggccagcccagttgtgcctccaaacctttgcacatgctgatccctcagtctgtaacaatcttctgtgactcaccacactggctttcagaaacggcttcatcacccatgagctctcccgcttcccccagcctaaacaccagggcctagactgaagtgacctgaacaggttcccacaatgtggggcttaagatttgaaagtaggagtccggcgggtgagggcccaagggacgcaccaccaacttgaagccaccgtgatgcgagcctgtgggtgaatggctccagaaactgcggtgactaggatggggacagccacatggcagcctccagcccagcactgacacgagatcacaatgggtggcaccctagcctagcgtcagagcctcagtcttacctctgtgcagtagggacaaggcttcctgttgccttcgcctccttttccctcagacctgacccagccctctgtagtttctgaacaggtaaaacagctgcaaggcagccaaaatgaccgccacaaagtgagacaggaagtcctgaccatcttcacccctaaacctggaatctcccatctttctgtgctttcattggataagcactgctgccactcagcagagaattctgggtaagggtcacatagctctcacacctccacacagtgaagagctttcccttgcagccacgctgtcttgaataaccctcattctcaggctctgggatggggaagtagctacatctctggacgtgtccagcaacgatcaccaaagttttgagacattatttcagactcttgaagctcagcatgttcccatgggccatatttctgatgttcccagagattacaaatccaaatggaatgatcattccatagtgttactgacacccaaagtatggccacgcatagctggaaactaattaccttattgatcttcaactgactgtggcctgaacagttagagtcagttctgtgaatttctgtatgccccttcagggagaagagaaaaaagcctccagatagggccacaatagggaagacagaagaatgatgttgggctgcccagaatcaagtggacaagggtggcaccaaaattttctggttttctctggagttgcccagcgagatcctctgctctccaacctttagggtgagaatctgctggagaagccacgggtggaaatttccgaggctagtgaaaccactcctataaacctttaaaaatgtatcagggaagaagggagaaatgaaaataagccaaggttgcagcacattcaacattaaccattccatcagcttgctctctgacccgcttttttatagttgttttgtgctgattgtcttcaaataatgggggttcaactttttggctccctgggccacattggaagaagaattgtcttgggcaatatgtaaaatacactaacactaatgatagctgattagcaaaaaaaagaaaagaaaagaaaagaaaaaaggtccttgcatgatttttgtgatatctgccaccacagataagctaaaaattccttgcattcaaagactcgaacacctgtgaaccctgttacaagattataattccccttaactactccatagataacaacttgaacattaggaaacattagggtttccctttgagatattccttgagatccggcataccaatgaaactactgactcagctggtctaaagaatgccacaggagctgactcatcaaagaatgcaatttccacatcctgatgattttgtctccctaaccccaacaaatcaatggccccaattctccagccccttgccttccatgatcttaaaaatcccagccaagaacttctagggaggtggatttgagagtccccttccatctcctttcctggcgccctgtaattgataaactctttctctgctgcaaacgctgctgtctcagggtaatgagtctgttactgcacagcaagcaaatgaaaacctcttggtcctataacactagtgagcctgcaagttcatgggcagctgcttgcaaaggttctccttggccaagagagtacacagcctgtgaagggaatagtggaaacccaacctctggagtgaaagatcaagactaagtcctctggactgagatcctgaatgacttcctgagtgaatggtagggactagacttttgggcaggaactggggggctcaagtccagcctgggtcagcaccagatctctgcagtgttgtgggtagatgtgcactggtgagggcataggggccccttggttctacctgggctaccctgccctcactgtgggctgccatgagttgtctgggcatgtgtagtcatcaagggtgttgtatctctcctcgccaccattcctagccagactcacacttcctctctttctttctctctcatggttccctatgaggtgtgaccacagatcagatgtggatagaacctaatggtcaacaccagagtcatataactccctgttttgcatgtgctttctttaaactagccaattcacaacccccacaggaaagcataagggataatggacctgatagggtttggatttgtgtccctccctgaccaaatctcatgtcaaattgtaatccccatgttggaggagggtcctggtgggaggtgattggatcatgtgttggggggacttcccccttgctgttgtgatagtgagtgctcatgagacctggttgtttcaaagtgtgtggcacctttccctttgctctcttcctccttttccagcaatgtaaggcatgcctgcttccccttcaccttctgccatgattgtaagtttcatgaggcctcccagccatgcttcctgtacagctacagaactgtgattcaatgaaacctcttttctttataaattacccaatctcaggtagttctttaaagcaatgtgagaatggactaatacaggaccttaaggcccatggaccttggcaaaggtctaatcccacaagtccttctcccctccaccacccccgacccgctgcacctggtagttgagctccttttgcctccagacatcctgttgcctccccctcccctgccattggcaagcctaatgtttctgggacttgtgcataataaatgtattctgtttcatgcgtcttggtttcacttccttattgtgtctcacctgacacacacctgaatgtaacttccacctggtcagagctctcctagagagtggctgtcttggccaatagccactccaacagagggatctcaagaccaaatagaaataaaccataacaaaaatcataacagaggtaaagatgttgggtctgtgatgtctactagacatctaaaaataggtcacaaatacaatattcttttactttaaaattttttttcttttgttctacacaaatacaaagagaagacaagaagaaatacaatattagatatatgaccatggagtttggaagacaagcctgagatggagatatacacataattttttggcttgtagtggtgtacttgcagccacaaccttggatgagatcaccagtagaatatgtgtagattgagaaatagatcaatttggagagaattggtatttatgcatggcgtctactatttctactaaaaatacaaaaattagccatatgcggtggcacacacctgtaatcccagctcctcaggaggctgaggcatgagaattgtttgagccaggaggcagaggtcagtgagccgagatcacgccactacactctagtctgggcaactgtgtctcaaaaataaaaaaaaagggttccatctccaaatgcggtcacattctgaggtgctgggggctaggacttcaacacatacattttggggagacacaattcatttcatagcattgggaaatataacatacatatagaaaattatttattatttatgtagattttaataaatttttcttaagttgatactgatgtaactaccactgaaggcaatacagagtattagtgtgctcagagtcctgagtgctctgtctgggtcacaatgtgctcctccctcaacacccagatgaattcaacatcccgatttttaaaatcagtattatctgactttttaaatagttttttctattgtgtatgaatctccaaaatatagcttatatgtggctgttactgacctttacatgaatggaataatatgtgctctgtttggtttgatatcttctgcaaaataaatgtaagattcactcagggtgttccatgtatccatgtatctctgtaacatccattttcattgccattgaaggaacaatttatctgtccaatcttttgttgatgtgcctttgtattgctttcagttacttgcgataatgatgttgctgtgaaagtttttgtccatatattctgatgtacataagaatggctttggttttttacacttttctttagcatctctcttgggaagatataaatatcttaaatgtttatgttttaatagcagaatttcaacaggcaaaaactgaccaaaccaaaggataacagtcaaattacaatcacaattggagatattaacacttctttctcacttattgttagaacaagcaggcaaaaaacaagagtgcaaaagatttatcttgatttagtggcatttgcataacactatatccaacattatttgaacacacattctttttctagtgaatatggaatgttcatgagggcaaacatactgggtcaaaaaataagtctcaagaaatttccaaagattgaacacatacagtgtattttctctggctacaataaaattaaattagtaataaataactgagatatctagaaagtcttcacatatttagaaataaagcaaaacgtacttttatataaccaatgggtcaaagaagaaataacaaggagcattagaaagtattttgaactgaatggtgattaaaacatgacaaataaaaacttgtggaatgcagtcaaaacagtgcccaaggtaatattgcaactttcatgtttatatttaaaaataaaaatatctaaaaataatgattgaattttaaatcctaaaattagacaaatagaaaaatgggctaaatccaaaggagaaataaagaaatagcaatcgtaagagtagaaataaaaagtatgtaatagagaaaattaacaaagctcaatacagatttttaaaagagattaataaaattgataaatctctgccaaaattgatcaagaaataagggaaaatttaaattactaataccagagaaaaaagcaatgccacagatctggcagacaatgaaaggataataagtgattatcaacatctttccaggagggaacttgtaggtacaaataattttcctggtgaattatgtcaaacatatacagaaaatattttaccagtgccacacaaactctcagaaaatacagaaggaggcaacttttcctaattcattctatgagactagcattaccataacaccagaaaatagtaataaaaaaatgtacagattaatatccctcacagacatagatatgaaaaccttttaacaccacttcaggaaatcaaatctaaacaaatataaaaggttgttctagcatgtccaaatggagtttgttcctggaattcaaggctggtttcatatttaaaataaatcaatgtaatttaccacactaagagaataaagaagaaaagccatgtaagtatctcaaagaggtgggaaaagtgattgacaagatttaattgcttttcaaaaaacaatatctcagcaaaagtaggaattgaaggaaatttcttttgtctcaagacaaaagcagagctatgaagtaatcataaggaattatgccttgagacacacagcttttgtactagagtggatcctgcacccaactgatgagcagcttgtgttcttgaatctgggaacagataggttatagacagctgtgtggtttgctgcaaggctcagtgagaagacaaatgcctgatggggttctgctgacaattgttgatctccgtcccacatcttttaaggagactggagcccagtgtggcctgtgggtcccttatgagttgaacctttagacctcccagtaggcagtggctgtacttattacagatgtgcatggtgctaagtactctgagaactacaaaaatgatcatacttgatgcacatatgatggggaggcaccacagtcaggtggttaatgcatgagctctggaatcagacagaatgggttcaaatcctggcttctccactaccttatgactgacctgagaaaggttctaaagttgcaaaaggaagtgaaaccaaatttgccaaaggaagttaagagaaacctgtctgccaggaagagatattgtggagtgtggcatctgggcaggagggcactctgcccccacctcagaacactttgtatcccaggtgatgctggggactcaggcctttccaaggtggccataaagaaggctcattttgcttcaggatttggacaggtgatagacagatcctgttttgtttgtttgtttgtttgttttaaaggtatccccagactatatctaccagcatggagatggggtagggtacagaggcaaacagatgtcctctgtggtggctgcctaaaaggaagaggctagggtaagtttagcacatgccctgttgctgccatcctgagcctcctgagtgcctcagtatctgcaagactgagcaaaaccctgtttcttcccatccttgactctcttactctgacctccagtgagctgggccctcactctggcacaatccaggttgctccagccctctgactttgagcagattctgccctcacgtgactcacagagaaagggctagtggattcccaggcactggttgctgaagctgcctctccaggccaggagttgagaagcctgcagtcctggtgccctggtggagccagctctgctggaactaagtacccacagtcctgaacagttcccacgtagcatggggccccatccagtggcaaacatctgcaactagcaggtggaagttccaaaggaacagccagaaagtctcactggggaaaggcccctgggtttccacctttgccctgtggtgactttccttcacatcctttgcagtgcaccctctgtcatgtagcccagggaggcatcacaaatatcaggatgaagagtgcatggtttgccttggaagattaggtagctaggaagcatctccaaactgcattctacatcctcagtatcagataggtatgccctgcttttcaagggcaatgcttttaggaagcttctcccccagcctcactgaatgccagtcccctgactatcaccccactggttcatccagaccactgtgctcctccctcacttctacagatacctcagtcttcactgactaactgatatggtttggctctatgtccccacccaaatctcattttgaattgtaatctgaattgtaattcccatgtgtggagggagggacttggtgggaggtgactggattgtaggggtggtctcccccatgctgttctcatgatagtgagggaattctcatgagatctgacggtttataagtggcagtttcctctgcactctctcctgccaccaagtacgacatgccttgcttcccctttgccttctgccatgattgtaagtttcctgtggcctcccagccatgtggaactgtgagttaattaaacctcttttgtttataaattacccagccccacatagttcttcatagcagtgtgaaaacagatgaatatatcaacccatcattaactggccaaccttatcacttccactgcccagtcagcccatctgcagacttgacctcccagcctgctttgaacctttgagatgaccgacatggacactactattccctgggtctcatctcctggtccccccaggacccagggttagcctggaagactcaagctctgggctaggtttcctctggtcttggaactcccatttgactggctcattgcagtgtggagtggacagccccctgcaaaaggcagtccccactaacccacctatgtttatggtaaacagccctaccccactttgaacctttcctttagcccagaagccacctctcagtcacatttggagctcctaaagggcagcagcaaagagtcagtcttctaggatacctgtctgcaccatcatacttatcactacttcagcaattgtctgttttctagtagctaggaccttgaccaactgggcagccaagtctgcctttaactctgatgaaatcaatatggttaccatgtcctctttctagcctccccctggcaggatcccccaatgtatttgatagcatttaccctttgagaaacgtaaaatctcaatacaagctctaaactgagcctttactgcagcccagacacccaatgggagcataatgccatcagattttgcgtacgtgttacctccatatccatctttgatatctctgctagcacccactcagccttgggtggcacctcgggtccttttcccatttgcacagccactacttctagctctggagccatcactggatgctcagcatcaggcacagttcaccttttgctaacccctctctcgacccatttccattcatggactctggggcttctttggataatgacagctctaggaccagtgtgtctgccccagacccagctccacatctgaagcactcagctttagaacagggcctagaggggcatgcagcaccttagtttatgttggggaggcttacacatgagcaccggggttcctgcaagcctacagcacctctggtacagttggagagggcagtactactgaaagcaaaaactcctgggaaacactttcctccctgcctacagtcagagcagctggggcctgtcctgccaaagcacacctcttagaacatcactgagaagaaacatgttccagaaggcacctctgttccttcttgtgttcataacacctggaaaccatctggccaaagcacgtctgttgtggttggaggagcccgcacataccagtgcttgggacacttctgtcttgcagacagaccacctggaatgcagctggccagagcacatctgcatccctcaaagggaaggagaaagcagcacatctatgcttggaggcctttatgtttccaccacaagcagagcaccctgttgcacctttccaagcacctatgttgcagtagcaggggacaacacactacctgtgactgcaagtcttctcttcttgtgtctggtcagagcgcttggggcccatatggcctgggcaaacctgttactgctggagaagcctgcacaacagagaagaaacatgtgccccaagatacttctgttcatgacttctgtcaaacgcctttggaccactcagcttgagcacatctgtttctgttggaggggctggtgccatatctgtgactgaagaaactactgtttatgaatacaatcagagcatgtgagggccataagtccagagtataggcagtgcaatgcctgcaatgggaggagatggcaccatacctgtaatgggaggagatggcaccatatatgggtttgtttgggggggacacttctgttcatgaacacagccagaacacctggggtccacaagtcctgaattcaggtgtacaatgggaggaaacagcaccccacctgtgcctgcagaaacttctgtccatgaatagtcagagagcctgaggtccacaagtccagattaaagatggtgcaatggcaggacacagtcccacacctatgcttactcgcgaatacagccagagtgcctgggttccacaagtgaggattcagatggcaagtagagggtacagtaccattcaagtgtttgggtacccttctcaccatcattcagagcaactgggacactggtggctggagcacacttgttgcagtcagatgggagaacatgttgaagaagatacttccattctcaccttcaatcagaacaccaggggcctaagccagggtaccttccctctttcattttggagaaaacaacatcactgagaaaatatctgtgcttcaggaccttttccacctgcttttgatcaggtcaaatgtgcttctgtggtgggcacggcaagcacagcctcgtctttggggcaccctcggcacctgcacagggattctttggggacagaagcatgcagcatcaccctatttgttttcttctcatgtaagacttagggtcctcagtgaccaaaagcaaaagcttcctctagaaatggcaggtgaccactgttccccatgatttgatcttgttctgctgggagcagtttctgctccttctagttacggcaaacaagcttcacctgccctttgtccttctagcacaaactggaagcccaagaccctggggtgtttgtgaatgtgtccaaggacttgggttcagatgagccaagtcagaagtcgacacactagcctaagatgttcacctgtggagagaagagagagatgggtgagtatcagccgtgcaacactacactctagtttcagtgttatcctggaagacctaagctttgggggggtttcctcctgtcttggaactgtcaggacacccactgctatctatgtctgccatgtttcctctgctcatgtgtttttgctctaactcaatgatggagaaaatactgacttgtataagccatgattgttgagccaggcttaactgtgcaaagtttctgtggcccagggcccaggatctagaacatggagtttaaatgtcttttttgcttgtttaatttagttgtatgccagtaattcacacacattcacaattttttttttggctgcagggggttgtgggggagagatggggatctcatcatgttgcccagcctggtctcaaacttggctcaagtggtcctcccgccttggcctcccaaagagttgggataacaggtgtgagccaccacgtccagcaacattcacactttcacctatggatgattggcttggcaatcaggcttttgggcctggaggaaaaaaggaagaaagaactcacgcatgactgctccgtaatttaaaaaaaatttaagtctgttaggatgtaatagattacatagatattggtatcatgttgctttgacacattacaaatgattatcttttaaggtaaatagcaggataggttctatttggaaaaataactggtctatctcgagtcctaaccacaaaaatatcgtcacaagatttataatttcacacagacttggctgaccttggagttgtactgtgctgaaaatacaatctttttaaagtattttacaacccatgaaggtatcttaagatggtggaaagaaaaataaagtacaagcatttccttcagctgcttacagattacagttgtcccttgaacaatgcgtgggggtaaggggtgctgcttcccccacgcagtccaaaatgtctgcatgacttgtgacttccccaaaacttaaccactagtagcctactgttgactggaggcctcactgataacatgaacagttaacacattctgtatgttatatgtattatatacagcatacttacaataagctagagaaaagaaaatggatgagtggatcatcataaaggtttcatccttgtcattttcatgttgagtaggctgaggaggaggaggaggatgaaaaggaggggttggtcttgctgtctcaggagaggccgcagtggaagaaaatccacatgtaagtggatctgtgcagttcagacctgtgttgttcaagagtcaatgtattatattaaacagtgctaggtcttggtgatatagaattcaaagatttatctcttgcagcccagcaatttacagtatagcagagagagacagatagataaaccaaatattacacctggaaagatagtggtggcgatacgggagtaggtaagaaggacataaaactaggtgtgagagagatggaaaaaataaaaaataataaaaaaaagaagaaggaagaagtgtccaggcagagaaaggctatttgggggtcaaagaaatagcatgctaaaagtcagggaagactaatctgtgtaacaaacctgcacatgtatcctggaactttaaattcaattaaattaaattaaaagtcaaggaagaaagagatcatgaccctgtgggacaccaggcaagtaatcaaatgtggttggagagtgaaacccaagctgggagatgtggctgctgtgttcagcaagtgcagatcatggacaaacagacataccatcagggggcatttgtccattatccacaaagtatgaggaatcgtgaaaggataagcaaagaagttacatgatatatgtagattttagaaacactctatgcctccctgaaaggaagaattaaatagatgccagaatagaagcagataggcttaggaaatttttttgcagtgatccaatgcaaaaatgagccactgagctcccagtctagaggaactgacagtgggatggttgaagaggtaagggaagaggcaaggggaagtaggcgatgccaacaagaccagggctattttagccatctggtttagataaacggacatgagttgttttggaaaacatacattaagttaactttctaatagtctgacatggctatggaagacgtaggtgatattcataaagccattcatttacccatttagtcatcagttgggcatatatattattatttgagacaaaatgagtagtctaaggaatactttaggtaatagcatcaattttttaaaaacaaggataaaaatcttatgaaacctaattctagttggagaaaataaaataaacaacaaatgtaataaattagtaaattatttgataggttccagtaacaactgcagggagacgaagggcagccaacgtaggattgagtttagggctagagagaagtgtgagtttctatttaaatagactggaaatggtaaacctcattgggaaggtggaatctgagcaaagtctagaaggcaacaattaagcaaaccacacagttatctgagggaaaggcattccaattagttggactagccactgtaaaggctcagaggaaggatgtctcttgcccgcagggagcagtgagcaactcaataggggaccaggatgaagttggcactttgcagagtgggaagaagggggaatagagatggagagggatgaagagactaagtggggccttggaggatgtgataagaacattgccttttactcacagatggaaatcatggagggtttggagcaaaggatgacgtgatctgactgaggcttaataggatcattctggtttctggggatgagagaccatttaggtggctatggtcataatcatgaaagcttggacacagtggtggtggtgcaggtgatgagaagtaaaatttgtagatattttgaagcattttctgttggcctgaatggcaggagtatgtgtggaaaaggaagaaggaatccatagacttgctatttgagtttagaaaaggttttggcctcatcaaggtatactcggtcactgggcgtgtgaaaaaagatggccgagggagaattcctagaaggggaaaatagggagggaggacatgggaggataacagactcctaaatacatgtggttgagttcattggttgtgcatatggaaattacccctacctcaaaccatcacacaaatgatgaatttaagatatcagataacaaaaaacatgaaaaaaactaaatccaggtacatcataatcaaactgcttagtctctaggagaaaatcaaaagacatcccaagaaaaagcacacattatgtgttccagtagaacacatgcattgttctaatgagaaacaaagaaaaagtaagatgtagctacagacgaatgaacaaaacttgaatatattattttcaaaagttcccccgaaacagaatatggcacacctctcattggaaatacacaagctagaactcaatgagttagcattttttaaaactcgaaagaaaaaaatactgtgaacctataccctgtgaacctgccagaatgtggagacacaggtgctaaaactacacccagtgaaactcttttaaaagtgaaggtacacacacacacacacacaactcaacctttttatacacgtaaatgcttatcgctagcatacctttcattaaaaaaaaaaaactaaaggaagtccgggcaagataaaaatagtgcaagttagaaatctggatctacacaagcgaatgagtagcaatggaaaaagtaaatataaaaatatatgcatatacatacatatgtgtttgtatgggggtgtttgtgtgtgcatgtcaaacactttctgtaaaagtaaaatgtatggcacaatggcacaaatgataagagagaaatggaagtgtactgttcttattgtatagttcttatactatatgtgaaacaatataatattacttggaggtagactatatatgttactctatatagtttatactatagtatgtagtatatcctatataatataaagaatcactttaaaaacacttaagaattatatttagtaggtaaacaaaagagataaaatggaatcatgaaaataatccaaaagaaggtatacaaagaggaaaaagaaacaaagaccagatggaacaaacaggaagcaacagcaaaattgtcagtgtaaacacaacgacatctaaccatattaaatttaattgtctaaatgtatgattttaaaggcagagattgttagattggattaaaaatacaaaactatatgctatgtataaaaaaaacacttgaggctgggagcagtggctcatgcctgtaatcccagcactttgggaggccgaggcgggcggatcatgaggccaggagatagagaccatcctggctaacacggtgaaaccccgtctctactaaaaatacaaaaagttagctgggcatggtggtgggtgactgtagtcccagctacttgggaggctgaggcagcagaatggcgtgaacctgggaggcggagcttgcatgagccgagatcgcaccactgctctccaacctgggcgacagagcaagactccgtctcaaaacaaaagcaaaaacaaaacaaaacaaaacaaaacaaacaaacaaaaaagacttgaaacacaaaaacgaatataactgaaaggataaggatggaataacaccaatgtaaagaaatctggaatagttatatcaaatggagtagatttcagacaaagaatgtgataaggaataaaaagagttatttgataatgataaaaggattaattcaacaataggtcataacaatgctaaatgtttttgcacccagtactagagcttcacattatatgaaacaaggctgataaaactcaaaagagaagtagcatatgagtcaaagaaatctcaagaaaaatttaaaaaatattttgaatgaaattaaagtgaaaactcaacttagcaaaatttgtggcacacagagcatatagttcttagaaggaaatttatagaaatggatgcatatattagaacagaagaaatctaaaatcaatctcaacccttaccttaggaaactacaaaaagaagagcaatttaggtccaaagtaagtgaaatgaaaaataattagagcagaaatcagtgaaatcgaaaacaggaaaacgatagaaaaaaatcaataaaaccaaaattgactctgaaaatatcaataaaactgataaatgtctaaataaaataaccaagaaaaggtagagaagacacaaaaaggagtatcactattgagtcacagatattaaaagcataacaaaaatattagaatgccacaaatttgataacgtagattaaatggccaattccttgaaagacacagtctgccaaaaggatagagaatagaaataagcctgtatctatcaaagtaattgaatcaacaatcaataaccttccaaaacagaaagcactaggccctggtgcttttactggtgaattctaaatatttgagaaagaaattaagttctttacaagcagctctagaaaaccgaggcagaggaaaaacttcctaactcattctatgagaacagcattatcctagtaccaaaatcagacaaatccattgcagaaaggaaaactacagatcaatatctttcatgaatataaatggaaaaagcctcaataaaatattaacaaatcaaaacaaaaaatgtataaaaagaattatacattatgaccaagtggaatttattccaggtatgcaagtctgattcaacatttgaaaatcaattaatgcaatctatcatatcaacaggctaaagaaaaaaagtatataatcatatcaatagatgcagaaaaagcattggagaaaaatccaacacctatttgtgataaaaagctttcagcaaactaagaattaagagtagaatattctcaacttgataaaacatctaccaaaaaaacctacattatatttaacggtgataaactaggtgcttttcttctaatactgggaacaaggcaaggacttctactcaacatggtaatgaagcaagataagcaaaggacggaaaatatatacagactgggaaggagaaataaaactgtcatttttggcagatacataattgtctatatagaaaacccctaagaatcaataacaacaacaaatgacctctaacaactaataagtgattatagtaaggttgcaggatacaagattaatacacaaaagacaagtgttttcttatgtagtagaaatgaataattggaatttcaagttaaaaacacataatacctataataccatttacattagctcctccaaatatgaaatatgtaggtataaatctaacaaaatatgcacaagatttatatgaggagaattgtaaaactctgatgaaagagataaaaaatctaatcaaacggaaagatattccatgttcatttttagaaagactcaatattgttgagatgtgatttattctcaaatttactgtatttcaacaaaatcccaatagaaataccagcaagttactttgtggatattaacaaactgattctaaagttcatatggagagtccaaaggaccagaatatccagcgcagtattaaagaacaaagcatattgacactacccaacttcaagacttactataaggctacagtagtcaagacagtgtggtattgaagaaaaagcagataaattcattaatggaacagaataaagagcccagaaatagaccatacaaatatagttaactgatatttgaccaaggagcacaggcaattcaatggagaaatgatagctttttcaacaaatggtgctggaacaactggacttacacatgtaaaaagtttaacttggacactgaccttacaactttcacaaaaattaactcaaaatctaccataaacccagatgtaaaaattataaaacttttagaagataacaggagaaaaatctaagcgatctagggtttggcaataactttttagatacaacacaaaaagcttgatccatgaaagaaaaaaaaagataaattggacctcattaatattaaaaactactgctcggtaaagactattaagagaatgaaaaaatgagccactgactaggagaaaattatttgtaaaacacatctctgataaaggactggtaattgaaatataaaaagacctcttaaaattcaatagtaagaaaacgaacaatcaattaaaaagtggccaaaatctgaacagacacctcaacaacaaaaatatacagatgacaaataagatatgaaaatatgcttaacatcctgtgcttaggtaagagcaaattaaaataatgagacaccactacttacgtattagaatggctaaaatccaaaacactgacaacaccaaatgctggtaaggatgtagagaaatggtatatccacttggaagacactttggtggtttcttacaaaactaatcatactcttaccatatgattcagctattgtgctcctaagtatttacccaaatgagttgatatctatgtccacataaaaacttgtacaaaatggctgggtgcagtggctcatgcctgtgatggcttgagcctagacgctcgagaacggcctaccgcaacatagccagacctttacctctacaaaaattaaaaaattggctgggcatggtggcatgtgcctgtagtcccagctacttggcaggctgaggcagaaggatcgcttgagcccaggagttcaagggtgcagggagctgtgattgtgctactgcactccagcctgggtgacagagcaagacctggtcttaagaaaaaaatggcaacacggtttctctacggcccccaccggccaccaggaccagaagcagctgcgaagccagccttccccagtttctccctgacagcgctgggttcgcccttccccaccacgaagagtgtccataaggagagctccaccttctctgactgaggccggaggtgcacacaaaggcgcagatcctggagctgctggtgctggagcagttcctggccatcctcccagaaaagctgcagccctgggtgcagaggcatcatccagaaaatggagaggaagctctgactatgctggaggatgtgcagagagcgcttgatggaccaaagcagatcttcttttttggacgaaggagggacacggttgcagagaagctagcaccttcagaaatcactgagcaattgccaactagccagcgcacgcccgtgaagaagcagctccagcgagaatcatgggagctgcagtccttaagaccacatgatgaagacatcaaaactataaatgtgaaatccgcttcaaggcaaaagacttcttcaggcatagaactgcattgcgatgtttcgaacatcctcggtataaatgcctcccagagttccacatatagaggaatgtatgaacaagatgattcaaaatatgaacataggattgcagagtcccaaaagaatatgtacttcaagactaggctgaagtgtcccaggtcactgtcaggaggcagataaataaagggccttaatctcttatgaaagctcacaagaccctccatactattgatgatatcaagttaatttcctgtgttggaaaaaaataatctcctttgcaatgtaatttggaaataactcaatggaaacattaaaatgactgcatgtctacaagcagtcacctaaacataaggaatgttttcataatgagcaatatcattctatgggtgcttctgtaaggtggatgatcaccttaacataaaggaaaaagggagatgaacaaaattgtcaaacaagactgatgtaccacaagtgttggcaagtgcagtgtgtgatggagaaatgtaccacagcttaactggaagagcaagcccttaactgctgatcacaatgcctcagtgtccccttctccagcataaatcagcatgaatatgtttcaagcatcacaagacaaccttttcagagtctcctgcattcttagtaagatgagtttctagacatgctctcatgaaatgataccctggattttgatgttcttgtacatacgaacaaatcactgaagttcaatttaaagggtccactgcagtcctttataaacaattgttgaacctaacctttatagttaataagttttaagacaacatttttgggatatcttatttggcttatctatgagatatgagcacctataagttttacctgtatttaattcagtcagatttcctgtttaaaaataaaattactgacttgtacattattaaagttattttgacagtataaacacagcataattatctcttttccagagattcttgataaaattctgtaatgttattacaagaatacatgtattgtgttttccatggtgctacagttaaccaatatggaggcaaacatcagaaatcaaagcccttggaaaaagggaagaggatcttagtcaacttctttggttgggttcctcatagagtgtaaaacatttcattctcagaaaatccaaccatatcttagagtagctccagaaattggcttagaggagctccggaaatgtggagtgaccacactctgcttagttagtatgctaatacatgtaagatcagtaggaggagaaatgaatgtgaattttattatagaattttctgagagtgattatgctttatagctccagtgaatatgaatatgtattgagttgtattttcagtcattaaaaatgtaggatactttttatttgggcctcattctctttgtaattaaagagaggaacaagcccatctattgtaacaacaaatgcctcagagatatgtgtattgtgaattactgcttaattatggaaaaagtttcttaggttctatgccatcaactttgtaagattgcattctctttcttgtgaataatttgaatgcctccaccaggaagtggtgcgaatcatatcatctaagtatatgatgaatctttaaggggtgttgctgtgtaatttgaattattttgcagttatgtagctatcctaatgagtgaatggtactagtttacatataaggagaactacttgagctaaccttgattttaaaaaattagcattagcacccccattatattaattttcagagatagtaaatactccaaaatgaaacaaacaaaaataacaacaacaacaaacaccttgcacatgaatgtttgtagcggttttaatcataattgccccaaattagaagcaaccaaaatgtccttcaaaaagtgaatagataaaccaactgtggtatatctatgcaatggaatattattcagcaatatgaagaaatgagctgttgaaccatgaaaagagatggaagaacattaaattcatgctgcaaagtgaaagaagcctgtctgaataggttaaatactgtatgattccaactatacgacatttggaaaggcaaaactagagacagtaaaaagatcagtggttgctaggagtttgggggaggaagggattacatggagcacaggagatttttggggtagtgaaactattctgtatgatgctacagtatgggtacatgacattatgcaattgtcaaaaaccacagaactgtatgacaggtagagttaaccataatgtgtactatagactttagttaatatattaatattggatcattaattgtaacaaatgtaccacatgaatccaagttgttagtaacaggataaactgtgtacgtacgggtggagaagatacacgagaacacactgcactttctcctcaatttttctgtgaaactaatactgttctaaaataaagtttgttaatttaataaaaagtaagattacagaagttgtaacttgactttattggtatttgtaaaacatataacccaacaccagctgaacacatgtttcttttcaagagcacatggaatgttcattaagattgggccaaaaaataaatcttaataattttgagattaatatgttttctctgatcacaatagaatttttgtagatctatctacaaaattgtagatatctacaatatgatatctacaaaatcctaaaatttacagattaaatattaaataaataaatactataataaatattaaatttaaatagttaaatatttaaaatactcatattcatatttagaatgaaagcaagacacacttttatataatcaatatattaaaaaataacaaggaaaaatataaaatattttggactgaataagcaaaacacagcaaatcaaaatttgtgatagacagctaaagtgtggcagctttaagcgtttatgtttaaaacagaaacattttaagaaacaatgatttaggtttctaccctgagtagaagaatcaaggaataaattaaatataaaatgaatggaaaagaagaaataataaaaatagacacggaaatagaaatgatagagacacattaattctattaatttctatttatagacatttctatatataatatagaaattataaagtgtaataaaatggagaaacctctatcaagattgaagaagaaataacaaagagaaaactcaaattaccaatattaggaataaaaagggaagggcatgagtcagatctgaaagacattaaaagggtaatggggaattataaacatcctctaagaaaaaatatgcagttccagacggtttttcaggtgaattctatcaaatgtgtaagaacaatattttacctgtgttacacaaactctttcagaaagtggagaaaggggcaacttttcgtaactcattctataaggccagtattactctaatatcaaaacctaacaagaagagaaaattacagattaatatcgctcataacatagacacaaaagtctttggcaacactttaggaaaaccaaatataaaaagatgatcttttgtgactaagtaagtttttccccaggaaggcaaagattcatttaacacctaaaaatcaatcaatgtaattcatcatattaagagaataaaagagaaatgtcctatggtgatctcaatagctgtgggtctcacaccacttaccaaaaacattctaagtaaagcaggaattcgagagaattcatttctgtgataaagcatatctacaaaaaatcttcagttaataccatactgaatactcttaacctatgattaggaactgggaaagaatatccattgtctcttcttgtatttgatagtttcctggatgttgcagcaaatgtagaagataagaaaaattaataaaaggcatagagattaaaagagaagaaagaaaagtgcctttaagcacagaaaacgtttgtctatgtagaacatctgaaagagggctgggcacagtggttcacacttgtaatcacagcactttggcaggccgaggtgggcagatcacctgaggtcaggagttcaagaccagcctggccaatatggtgaaacctggtctctactaaaaaaacaaaaattagctgggcatggtggcacatgcctataatcccagctactcaggaggctgaggcaagagaatcgcttgaacccaggaggcagaggatgcagggagctgagattgcaccactgtactccagcctaggggggatacagcaagactaaaaaaaaaaaaacactaaagaatctacaaagaaactacaaaatgtaaatagaaaatgagcaaggtttcaatacaaaagtaaatatatcaaaagcagttgttttgtccatatactactatatgccaatatatgtatatagtacgtgagtacacacacacacacacacacacacacacacacacacacacacacaccccatcatcatcatcattttcaggggctagggaagttgatattggtcaattatcaatctcacccagggccctgacagctggcctatggaattattgcaagtgatattggtgcccttggggcataaagcttttaagctagcatggatcttgtatctacctgatgtacatcttatgtcctcgttcctgggagaagacagctcacagacagctgagtttttggctgcacatcctacttagaagagaaatgcctgattgtgccatgctgacaagtgttggtcctggcaaatacagaaggaaataaagagaaataaaaagcatgtagattacaacagaaggaaaactagctttattcacagaaacatgattcctagaaacattattgtgtatgtagaaaatcctatggaatctgcaaagaaactacctgaaatcaaaagcgatttcagtgaggttcaatatacaaactcaatatgtatgcatatatacatttatgtacatacacagtcatgcacctcataacaaggttttggtcaacaatgaactgcatatacgacagtgttcccataagataatatgacattgttactgtttcttttctgtgtttagatatatttagatacacaaagacttaacgttgtgttacaattgcctcaaattcagtatatgccgtacaggtttgtagctacaggctataccatatggcctaggagtatagtcaattataccatctaggtttgtgtaggtacagtctatgatgtttgcacaatgacgaaaatcacctaatgatgcatttctcagaaggtattcccattgttaaagcgacactggactgtattatatgtattacctatattctaccaatgaactatcaaaaattaaaatttaaaagattccatttacaatagcatttacaaaccccatagaatacttagaaataaattagcaaaagctgtggaagatctatgcacagacaactgcaaaacagttgcaaattttctcttaaaaagccagatagtatgaggttggtacaaaagtaattgcggtttgaaagtaatggcaaaaaccacaattacttttgcaccagcctaataagtagcatagcctttgtgggtcacgttgtctgtgacacagactctttgtgtttctgtgtattctgctgcaactctttaaaattgttaataggatccttcactcactggccttacatgtaggctacaggctaaatttgttggcccataggctgcagtgctgacccttgctgcgaaatatttctaggagaaaatactcaagacctaaatctatggagatatatatcatccctgtggcctggaaaagttaatattggcaagttgtccatcttggccaggaccctgaaagatagtctatgttattgtaagaaagattggtgtccttgggggcatgggcttttaagccagggtggaatctgcagaagtctgaggtgccatttcctgtccctatacctgggagaaaatagctctcagacagctgtgtggctttctgcaaagctcaattagaagagaaattatcaggcgtggtggcgcatgcctgcagtctcagctacttgggaagctgaggtgggaggatctcttgagcccaggagttcgaggttgcagtgagctgtgactccagcctgtgtgacagagtgatacgctgtctggagaaattcatcatggagatatgctgataattggtggtccctgcctacatcctcccaggagactgagccagacccggtgtggccaatggtccacttataaattgaaccatgttagacctcctaacagtgcaagtactcattacagctctgacatggtgctaagcaccccaagtattataaacaagtgtaatccattatgcacacacggtgaggctacaccaaagtctggtggttaaatgcatgatctgtggaatcagacagcatgggttcaaaccctggctggggtgagatggggaactttctaaggcttaaatgctgttttaccaaatattttaaaagaagtgaaaatacactgcctgttagaaagggaagttttggggtgaagcatgtgggcagtttagaatacctggtgtccacctcagaaaccatcacagcccagatgttataggttcaggcctttccagggcgggcacatagaatgtcctcgcctccaaggtttggagagctgcgctataaaggttcttgcaggcggtgtcctgagcccagagctgcctgcaggcgggcaggagttgtgggggtgttggcatgatctggtgtcctctgtggcggctgcctgaaaagaagaggccgagggttctttgtcctatgtctctccgaatcttaatacctgccctgcagcagactccctggctgccagggcacaccggtcaccccggtagacggtgccgccccgccctcgccaaccccttatcccaactcccatttccagccttccaggaagcccgatccccacccccgcaccatgtgagctgctcctctactccgcgtaggggaggctctgcctccggtgaccccgagggaaagagctagagcacccacaggtgctgactgctgcggcgctgaggacgctgcacacccgttcaccggctgacccagtgctgctgacaaccagcgtccgcggcccccaaccgtcgaacagagcgcgtgggaccatctggtgccaaacgcctgcaacggagtgcagaaggtcacgaggcgctagagaccggttgggggcaggcggttgggccttgacgctctttgctgggcgtcgttttttcttctcgcccccttcgctcctgtgcgcttagtgcacaagccctgggctcacacaccctttctctgtcacgtgttccaacagcatctcacctgcatcgggctgaacaggagacctcaattttctcctctactccaaggattcgccggctcacaattgctcttcatatcttcagcaagctttgtctgtgccctgcccctctgtcccccattgcctaccatacccgctcccaccaagcctgcatcacctcgctgtctctgtgcctctccccggcccccttccaggcctttctcccacaatttctggtctttgctcctgggtgttccgtcgaccctaagaggcggtgtctgatctggcaggctcaatgcctttctctggcgctgtctgcacctccaatatattcagtgactcaggaaggatccatcctgcagggcccagatagactctcctgtttgccacctgagcagaaaggcacctctgtgaggtctttgccacccagtcaccctaccagacccaatcagcacgtgggagacgtggatgacaggaggacagagatggagagggaccaaaagactacatggggccttgaaggatgtcataagaacgttgccttttactgagagatgggaaccatggagggtttcaaactgctgagactggcatgatatgacttagggcttttttgtttgtttgtttgtttgttttttcttttttgtgacggagtctcagagtcttcctctgtcatccaggctggagtgcagtggtgtgatcttggttcactagaacctctgtctcccgggttcaagacattctcctgcctcagcctcccgagtagctgggattacaggcacccaccaccacgcccggctaatttttgtctttttagatgttttatctcagagaaagagcttccatgttctctaactcttgtaaacaggtattcttcaagaaactttacaatataacattcatacacagaagtgtacaaatcatctgtctattcctcaatacatttttgcagaatgaacaaacctatgtaatctagatcaagaagcaaaacacaggcacctcagaatcaacctcatgctcattcctagtcactatgcccctcccaaatttttaacattatagattagttttgcctatttaaaaactttatataaatggaaccctaccatgtgtcctgtttgtggctgtgtcttttcattcaacacttcataaaattcatccatgttgttgcttttagcagcactttattcttttatattgctgtgtgatgttccattgaacaaatataatttacccattctattattgatggatgtttggctattagaaataataatgctactgtggctaggtgtagtggctcatgcctgtaatcctagcagtttgggagactgaggagggaggattgcttgagaccaagagttcaagaccaacctggccaacatagtgagacccccatctctctttaaaaaaaaaaaagaaagaaataatgctgctgtgaacattcatgtgtatgttttcgactacttctgaggtaggacgcaggactcgactccagagccggggcttggacactggagcaaattgaggactagctaaaacagggtcagggtggaagcagctttccatcagacacacccaccagtgtgctatgtcagtttacatttgtcatggcaacatgcaggaattactgctcctttccatggcaatgacccaatgacccagaagttactacccttttcctagaaatttcagcataaaccaccccttaatctgcatgcaattaaaagtagatgtaaatatgactgcagaactgccctgagctgctgctctctgcgccctgccgatagagtaaccgtgctctgcaggagcagtcacagagctgtaacactgcctcttcaatagagctgtcttcttccaccaccagctcacccttgaatcctttgctgggtgaagcaaagaaccctcccaagctaagccccaatttgggcttgcctgcccagcatcacttccaatatcatggaaattttcagtgatgcctactatgaggtttattgcttaacttttcacatttagctctggaattctcctgtcgatttgcatgtcttttgtagatttatttcatgtttattgatgctactataaatcctctgaagggatttacctttggatgtagaaggcagctaggatgggaaagcacactttattctgagattaatgtaagtcagagccatgcttcactctttttgaaggctggctctctcctgttatccttatttctgggatactggctttcagacgttttacatgaaaacctgagtattttttggggaccctcttcattggcaggtcctgactctgaatttttttctcagcagccgctgaaattgctgaattttacctccaaaacttgatttgaaaaaaacgaagcaaaggtagaaagaatatcattctaaaatcattgttttataaacagattttgctacgtagatgcaattggccataataatggcagagaaggccagattttctttctaactgttataacagtttttaaacatgaaaaaggttcatttagaaaacaatgttaaggtaggggcacggcagagaatgggaagatggtcagccgggaggagcagtgcaagaagagagcaaagacacaagcactcttgtgtgcagaaaaggcatggtgaacataggggtaaaaatcactagcccttctcggagcaattccaacattatctgaaggaaagtccatggaccatgagaaccccccaccttctgagacacatatatctggactgtgggactttgacccatgttggatcagccagatcccctctccctggagcagtttgtcggcacaggaagagaacagctcagcccttggagagagagtcacttatgggtaggatgccctggcttcctatggctggcaagtgtgaaagttgattatataaattgagccattcttgttatacccaactaaaacagaattggaaggccaggaggagaaaacacactcagggcacgccaagaatgtaattctttgcaagcctagctgctgaaattgcctgctgtaacccaaaaacggttttatgtagtagcttctgaaacaacctgccggactctatgattacttttacccactgctatcacttaccaatcagaacttgccagctccccaaaactttactagtgccaatgagttgtctttgcaaaataaattgtctttgctcttttaacgaaacctctttctatttgttcttctaaaaggctgcccagttgtgtgccctgaattgcaattttcacttcccaaataaaacagtttatatttatagagatttatctctgtattttgatttcgacccaacgccctgatttgctcactgctgtgatccagttgtacctccaggttcagtcaatcctctccaattcttcaaggattgtcccaagataggttagttttggctgtcctagcttttcatataaatagggacatgcagtatgcattcctgtgcaaggattcttttcacttagcagaatgctgtgcttttgtacttttgttgtctgtcatcaggggttattttctttgatagctgagtaatatgaatacttcataatttctttttctattctcatgtggattggtatcagggatatttccatattatgcttattatgaataaggcttttatgaattttgcctactatgcaaggctttttgtgtcatgcaagcctttttgtgtacatatgttttcatttctctcaaggaaataattcagaatggaagcactgagtaagaataagtatatatttagttttatagtaagttttatgacattctttcaatgtgattgtaccatttcatattatcattgcaatgagaaatcttccatgttttcatttctctcaaggaaataattcagaatggaagtgctgagtaagaatgtgtatgtttacttttataataagttttatgacattttctcaatgtgattgtaccattttatattattactgcaagtgagaagtgttccaagcgctttacatccctacaggcattctggtggatgtgcaatggcatctcagtgtggttttcatttaaacttccctgatgattaataatattgagcatttttggtgggcctgttgaacatttctgaatcaacttttggaaagggattattgctcaaatgttttgtccagtttttttaattgggtggtttgccttattgttattctatcattattattgttaggttttgaagggaaggggagagagagagagttggtggctctacagcaacacaggtttattgccagtacaacttgcagagaggggaccagcttggtgccagagctcactgctgcttacaggctggggtaattacaggtctgggcaggaggggtctgggcccgtatggcttgctgcccaggaggatgttgataaagatgttccttgggcctttgcccagcaggatgtgataaggaagtcaggtggctgggcaggatgtttctcacagcccagggccccatggaatctttcattctgaccagggtctgtgaaatggcagggacttgcaaaatggtgcagcttggactaacaattattattaatcctaaagggagaaggagattcagcaagaatggtgaaaggagaattataagtagggcttctcgtttcatgatcaatatctgatgggggggggtaagtacaggggcagtcaggattggagggtctggcaaacaggtcagctgaatcagtgtctactaatgaggcaggagccaggatccacatgatgaaagtggccacagtcaggaagtctgaaattttctcagcagaaagggagaaagaacaggcaggctgagtggccctgctgtctgaaggggcctcagttttatcctccaacgccttggggctccactggtgctcacctctcttctccaagcctaggtcttcagcagtgactatacaggaaacctagggggcagaggtagctctcctccacccaacaatagcggcagtggcagcagcaggagtactggaatttggagttacagagctcacagctgttagatgtgtttggaaagttccttcttgagagtgtctggaagctttttctccctgtgtcttgtctgactttagtgaggctggagatctgggtgaatggcctccatcaacatcttccttcgcccacctctccagtagcagagtgcagataagactggacgggacagccctgctgaacccacggcagacctccaaagaggtctgtataagctggcgatgtcactgactttggcaaatgggctcagagaagatgctttcttactcaaggtgtcttctgggtgtttggaacagaggcttcctttcaggagtccaggactgtactggaaggaagtgaccacaagatgacaccgttgatcttccagacactcccgctgttatgagggtgaggggggagcccttctctaattatccttcttttgctactttttccctctgccttagcttttcctttcctgcactctcctggggacttcaactcagtctttctgaggcaagtatggaggggaggacagggtggcccagcttcgtagagatcactacctgctcaaaccccaaacagaaaggagtcatttgcagcctggaggaggactctaccattccaagatattcagctgaacaccctagtagtgctagccggcagcagtggctcctgagacctccacaccagagtcccgcacacattcaaggtaagaaccccagagaggagcccagagcctgcggaatcagacaccgcctcctagcggtgatgtccaaccgaaaaggcgcgggactgcagtaaacctgggcgagcaaggtcgaggagagctctgtgccgggaccgcgaggcgatccagaccagatgggggacgaggggcgcgtatgaagcttgtagaagaggttgccggtgaagagcagcctgtgcgctgcacaccctgttacgcaattgagccgccgttggaacgcgtggagagaaagggtgcgcgaggccagggctcgaagaaacgcagcagagggcaaagggcgaggtccaacggcccagccccagcaggggactctcgagcttcgggattccgcctacccggtagcggctgtttagacccagaccggcccctgcgcgatatgagcaccgctcaggactgcagctgttgggcaccagcagccaggtctgcaggctccgcgaagcctggcccggaccgtagcttctgcaagcagtccaggtgtatcctggggtcactggagggcagagcctgctcagagcgagtacagaagcagcccaggtcttcccagcaccaggttcactggaagtgccaggtgtgggagagggagctggggagggaagagggctatgctggttcccgagctgaatgatgtacccaagaggccaggtagctgcagcaggtgctaagatgaggaggagacgccatcatggggtgcaaatatggagcacaaaaggctggaccctcatccttttaggcagctgctgctgaagacatctgtttcccctctcccctcctcaggccaccacctccttcatgctcctctgtgatcacctctccaagtcccggtgtcaggagccttctctgtggccgccctggagagacttgagcctgggacgtgacgtgctgggctgtgaagctttctgagaagggaaacctgtggcctgacctgcctgaatgctgcacccaacctcatctcttcctgggaggcaggctctcttcgcttgtttttacaaatttggtaaaacagcatttcagtcctagtccctggtagtgaccctgccaggatttgacccaggctgtctgactctatttatgcacaaatcacgtattaccattttttattgtccttagtccatggcacacatataatgagcacttacgtggcccactaggaagtctttcctttttgcttcaaactcagatcttggccattggccacaatggggccttggtctcctctgaagatgacctgggactgctgttcacaagcaaatccccattgggcatttctattctcattgagcttgcagcaaaccatgaaggtccctgtggcctatcttctcccaaagccaaggatgggagatggtacatcaggtgggcacaggattcatgctgatttaaaagctttatggcagggcacagtggctcctgcctataatctcaacactgggaggctgaagcaggagaaatgctggagaccaggagtatgcaaccagcctgagcaacacagtgagaccctgtctctacaaaaaaattttaaaataaaattagctgggcatggtggcatacgcctatagtcccagctactcaggaggctgaggtgggaggatcacttgagcccaggagtatgaggttatagtgatctatgatcacacaactgcactacagcctggacaacagagcgagaccctgtcttgtttgttttgttttatttttgagatggagtcttaccctgtcgcacaggctggagtgcagtggtacgatcattgcaacctctgcctcctgggttcaagcaatcgtcctgcctcagcctcccaagtagctgggattacaggcgcccaccagcacgcccggctaatttttgtatttttagtagagacggggtttcaccatgttgtccaggctggtcttgaactcctgacctcaggtgatccacccacctcggcctcccaaaatgctgggattacaggtgtgagccactgcacctgggcctgtctcattttttagaaagacttttcaggatcctggtcaatattgacaatttatcaatattgacttttccagtacaggagcatgatatatgtctccatatatttaggtcttttaagatttaagattttctctcaacaatattttgtagcaaggtcaacaagctaattggcccctgaactatttttgtaaggccagtgactaagtacagtgttaacatttttggccgggtgcagtgcctcatgcctgtaatcccagcactttgggaggccgaggagggtggatcaactgaggtcaggtgttcaagaccagcctggccaacatgatgaaagcccatctctactaaaaatacaaaaaattagctgggtgtggtggcaggcgcctgtaattccagctactcgagaggctgaggcaggagaattgcttgaactgggaggcagaggttatagtgagctgagatcatgccactgcactccagcccgggcaacaagagcgaaactctgtctcaaggaaaaagaaaaaattaagggtctaaaaatataagaacgagactaagtggaaaagaccataagcaacccataacgccatatttactatctgggtttttaagagaaaatttgtaaccactgttttgtagttttctgtgagtctaacttgcagagcttttgctaatttattcctatgtattttatgtgagttgtaaacactactgtaaatggtatcattccaattttagttttcaatcattcatcaatggtatacagaaatttttaaaaatacacattgacttgtatactgagaccttggtaaattcacttttgacttctggtagcttcttcgttttctatgaatcatgtttatgtgaataaagctactttaacttctgttttaatctgcatgcctttttctttctctttcttacctttacatttgcagaaaccaacaactgtcagcattgacaccatcaggcctttctcttctaatttaaccttgcagccaaccacacggctatctgtgcgggatctctccccaagctcaaggacatgagatgcggatcaggtaggtgcaagatccatgctgtcttaaaaagtcttataaggccaatatgtcttggagcaattccatacaccaggggtccccaacacccaggccacagaccagtactggctgtggcctgttaggaactgggtcacacagcaggaggtgagtggcaggtgagcggatattaccgcctaagctccgcctcctgtcagatcagcagcggcattagatgctcttaggagtgcgaaccctattgtgaactgcgcatgcaagggatctaggtttcacattccttatgagaatctaatgtctgagaatagtttcattccaaaaccatccccccgctacccatggaaaaatttttttccacgaaaccagtttctggtgccaaaaaggttggggactgctgccctagaccagctttctggattctggctgaaacggacaacttaccaatattaattcttcactccaccagctgatacacacacacacacacacacacacacacacacacacacacacatttgtacgtgtattagtatacggcagtttacagaaaaataattgttttatatatattgatcttgtatactagcaccttgcaaaattcataccttactttttataattttttatagatggattataggattttctgcatacacaatcaggatttctgtgcattgagtagtttaccctttccttttaaatctgtatgattttaatttttcttatcctccacatttgctgcaacctccaatacaacattgaatccaagagaagtcaatggacttcattttctacttcctgatcttggggggaaaatattcagtatgctgttaactgaagttttttttcgttcaatgcatgcattatcacataaaagaaataaggaaattccgtccacttcctactttactgaaagattttttttgaaaggaatattagcttttttcgattagtttgttcacaactattgagatgaattgtatcggctgattcttttctaatagcttttttgagagacaattcatgtaaaatacaatccatgtatttgaagtatagaattcaatggctattagtctattcacagaaatgtgcaaccatcaacacaattttgtaaagtattcatcaccccaaaaagaatctttgtacaccttagccatcaccttctaatacccccacacctcccagttctaggcaagcattaatcgactttctctctttgagtttacctactctggacatttcctgtatgaaaccatagactatgtggttctttctggctggattcattcatgtattataatagttttatatggcatatacataacacaaaatttaccattttaacaatttctaaatgtacaattcactggcatttagtacatttatattgttgtataaccatcgccactattcatctccagaactttttcatcatcctaaattgaaactctgtacctattaaacaataactccccagcacacattccccacagctctggtaaccactattctgtctctatgaatttgcctattccaggtatatcatataagtagaatgacacctttgtccttctatgtccaggttgttttacctggcatagttttttttcaggttttatccatattgtagcatgtattagaatttccttccttttgaggctgaataatatgccattgtatgttttgtttccccattcctacattgctggatacctgggttgcttccagcttttggctattgtggatgattccactatgaacatggggtactactgggaaatagagtagaatgaacctgacatttattcaacaacacagacacatctcaaaaccattatgcttatcaaatacccacacccaaaactgcatactctgattctgtgtataacaaattttagaaatagcaagattaatatgaaatgtcagaaagcggataaatggttgtttgtggttagatatgcggaggaactaacaacaaaggagcataaggggattttttaggatgatggaaatgatctgtacctgaattgtggtggggccttgagtgtacacatttgttaaaacttagcgaacataaaacaggtgcatttttcatgtaaattttacctccaaaaggtttatccgaaaaaaaacatttgatgcaaaggcagtcacaacgtcatgctaacgtcgttgattgttttataggcaactgctattgcagttgacgatatgaaattgacgataattagggcagagatagactatgtggttctttgtggctgggctcacttacgtagcgtaatggttttatattgtgtataaacaacataaaatttaccattttaacaatttttaaatgcacaattcactggcaataagtacatttatattgatgtacaattattgccactctccatctccaaaacttttgttcataactgctatggtagtttgtaatatattttagacaattcatttagaaaagattaatgctaaggaaggggtatggtggataataggaaggcaagcagtgggggtgctgggcagggggtaaggcaggaagaaagacaaagcagcaagtaagcttagatgcagagaaggcttgctgacatgcggaccttgtccgagcatctgttgcaacataccctgatgagaagttcatgtgcaatgaaactccaactcctgggacctatgtgtggaacactgggaccctgaccccgtcagatcagtcagatcccctttctccagagcagattggtcagcacagggagacaacagctcagatcttcgccctgtgagatcacttatgggaggggctgccccgaccccccacatctgactcccccatgctatagtttggtttgtttgacccctccaaatctcatgttgcaatgtgatccccagcgttagaggtggagcctgatggtaagtgtttgggtcatggggttggagcccccatgatgtcttggagctttcctcacagtgatgagtgagttctcactctattaagccctgcaagagctgattgttaaaaacagcctggcaccttcctcccctcctctctcgcttcttctcttgcctagtgatctttgcacatgccagctcctctttgccagcctaaggccctcaccagaagcagatcctggcatcatccttcttatacagcctgcaggactgtgagccaaagaaacctcttttctttataaattacccagcctcaggtattctttttatagcaacacaaaaatgaatgaaggcatccctctcttcaatgctgcaggaattgttttcattacaggtttgggctgctctataatttcatataaatgggagcatacattatgcactgttcttaagccttaaggagtctttcattcagcatcatgtttctgtgatccatccatgttgcctgttatcaggaattcattcactttgatatctgagtatgaatgcaccatggtttgtttttgctttctatataaatagacatctgaggtacttccaggttttacatattatgaataaggctgctgtgaacttttctggtgcaagtgattctgtgtccatgtgtttttatttctcttgggttaatacttaggaatgaaattgctcagtcagactagatatatgtgtagttttctgagaaaccatatgaacttttttccaaagtggttttacaattttatattctctccagaaatgaagaagagttccaggtactccatatgcctgccaacatttggatacctgggttggataccttttaaactttatccatttcggtggctgtgtagtggtgtattgttgttttaaattttcatttctctaatgacaaatgatgttgaatacttttacgtgtgcttgttttatgatacttctttataggagaattgttcaaatattttgcccatttattatgtggctgggcattttatagttgacctgtaggagttctttatagatcttgcacacttgtcctttgctagatatatgttttgccaataatttccccagtttatagcttatggcttgcctatttattttctgaattaaatacttttggggcaaaagttaatctcgtttatggtttccagataataaattttcttttgatgcaatctcatttctcagtatcttattttataatctttctattcttaaaaactcctttgtagcccaagggattaatcagggtctcttacattttgttctaagacgtttataattttttgaaaaccttgttttttgaatccatctggaatttgttttcataactgtctgaggtgaagacgtcagcatttctcccatacacacagccaatggtcttcgaactcaaccgcatgtttgaggaggagaaagaggaggaggagtccatccatcattcctctgttttctcccttcttattttttttgagacagggtcttgctatcacccaagctggagtgcagtggcacaatcatggctcactacaacttccacctcctgggctcaattgatcctcctgcctcagcctcctgagtagctggaactataggtgcatgccaccacgcccggctaatttttgtatttttttgtagagatggagttttgccatgtttcccagaatggtcttaaactcctgggctcaagcaatccaccccccttggcctcccaaaatgctgggattacaggcatgagccaccgcgcccaaacttcccttcttatttttggatgccatctgtgtgatttgtttccatagtccctgtgatcaagtattcattaatgagaaaaaatttccccctcccagaacagcaaattcctggaccctttctctcacacacactcccatcattcaattccacaacaatactttgatacatgtacacaatccaaagtgaatgtgcacaatccacttctcatgccccccactgctgttgtgtgtccaagccatcattaccctccaccttaggggctcagcctcctgactggtctctcagcctccgtgctcatccgagcaaccaaaatcatccgcttaaaatctacggcagatcatgctgtcctatgctttaagccctccagtcattcccatctctgaggatgtcatcactttataatgacaacctacaaggccctccctattttgtgtgtccccatccctttctgctctcctcgcccccactctctctcgtgctgaccgcagccccatcagcttactgactgccccacgaggatgccaggcatcctcccttcgatcctttgcagtggctacttctgctgtttccagtgttcttccctcacgtgtctgtgtgggtcacttgatgacccccttctagaccttgctcaaaactcaccttcctagtgaggttgtcctctcttccacgtgcacatggagacttctgcttctccttactccaagtgtcaaacctccacaggcaattttattcttcataacatgtgttaccagctaaactgccacatcatttatgtgtgattacgattgttgtttattttctccccccgccaactcgaatgtaagctctgctgacatttttgctgctacttataataggtcccagctcatcccagatgctcaataaatatggcaaattgacaaataaatgagtcaactgccttctgaatattactgattcatccacagggtttcacactattaaaaaccgaacactattgaaagctgaactcaccctacgaaaacaatgcatgtccatttgtctaaggcaagtggctacagtcaccctggtcatgtgtggcagttaatcgtctcacttccctcttctgctacttcctctccagccactctcagctcctctagaacgggagctcattgtctcgtctttgctttggccaaagaacccccggagcccctttacctctgttctagcacccattggattcttccttccaaggaagtacaagaatgtttctaaaagctacatatcatcatttcacttctttgctttcactcctttcgtgactttgcatactttcaggatgaccgacaagtgcccatcacgtacattaatttgtccgttatctggcccctgctgatcattacagccgtacaccccaggcttgacttcattctccagctgtacctgactaccttccttgtgtcccacaggctcacagcctctctggcttccttgacttttcacataatatttccttgatgtgaaaatagccccactctacctagaggcttcctcctgcttcttgaggtgcaattaaagttccttctctcccgtatttaatactatgtccttcttacctgctctccgatccctagcacaaagtcctatttaaatttttgatatgcatctgtctctcctactagaatgtaagttcttgtaggtcaagaaatgtctttgaaccctatctcaccagtgactagcacagtgtctagtgcaggttcatcactaagtaaatgtttaataaaataatacataagaagctggcagaaattcttgggttttccctctttcctccatctgaaggtggttttcctgggttataaaatgccttagaaattatagagttttcaacaatgaagtctagtttagattcagcctgactctatgatcagccatgggttgggtggagtgtcaacttttgcaacttgagattttagtggtttaaatagggacaaactgtatcttttcccacataggcccaatccaggtacttacttgaaaataatttatttttctttcatttttttcctttttgagagggagtttcgctcttgttgcccagactgtagtgcggtggcgcgatctcggctctctgcaacctctgcctcccgggttcaagcaattctcctgcctcagactcctgagtaggtggaattacagtcacccaccaccacacccagctaattttttgtatttttagtagagatggggtttcaccatgttggccaggctggtctcaaactcctgacctcaggtgatacaccctccttggcctcccaaagtgctgggatcacaggcatgagctactgcgcccggcctcaaaataattttttgcaggactttttaaaggagtatgataacaacttttgagtcatatattttatcctagacttaaaatgtttcagtaattacccagtggcatgagctctttctttcattgttcttgcaggcccaagaggctggatgccaaacctatcctctccatgtgaagcaccaacttgggggtgtcaactaaaaatatgagacccgtaaacttggaaaggaagactttatttcttgagaagggttgcaaactgcaggctgggaagtggcacctccagctgagaccacaaacaggtactttgagggagatagggtgggataggagttttatgccaaacaggttggctaaacagacatattcaacaggtcacagggggaactatgaatattcatgaaagggggtcatatgtgtgcttgataagcaaacatatgtgttacatacatcccatgttcaccttcgagtggagaattaacattaaaatgcagtaaaattaggttctgtatgttaaaaggtgaaacacaggacatgaagacactttgtacacagcctcggtgaaccagccagaaccagcccatggttgaatactttgtagcctagtcagtttgtcacttcaaaactgcaaaaagggctgggagtcaggccgcatcagcaggcagttggttgaagtcagcggaggggtgttccattctttgtttttccagggcttgtttctgtttaatttgggaaacaaacaaaaaaaaaccctggtaacagtgaggaaggggtatacggaggcgcaatttcccatctccttacggccgggaaacttagtttttagttttttgggggtcaccttggccaagaggggtctgttcagtcagtcagagggctcagggttttattatttatttgtttgtttatttttctgagacggagtctcgctctgtcacccaggctggagtgcagtggcacggtcttggctcactgcaacctccacctccagggttcaagcaattctgcctcagcctcacgagcagctgggattataggcacatggcaccatgcccggctaatttttgtatttttgtagagatggggtttcaccatgttggccagactggtcttgaactcctgacctcaggtgatccaccccacctcggcctcccaaagtgctgggattacaagcgtgagccacctcaaccggcctctgggttttatttgtatttcacagtggaatgcctggccccaatctaatttaaaaaaaaaacacatagaaaagatattcaaacatttttaaaagacgaaaacagtaaagtgtgctttcctgtcacacagcagggaggatctgacctttggggaggtcagatggtgtaggggaagcacagagggaggtggcaagggcatgtcctggtctctctttctctggacctctcctcttcctgggctgatatcctcacactctcatcagagacatcagaagtcagcacaaacagtcctagagtgtgctacttccatgtcacattagctgagccacagaaaattttgaaatgtcaagtctggctcaacctgtcaccattcatagaaggcatccttccttctagactggcctaaaagtgaagaccccagagcagagactcatgaacatgaaggaggctttagatatttaatccggaaaagcaagtaaaaggaccatggagacaaataggttaaaagaaaaggaacagcttgcccgcagcggggtgggagttgctggaggtgctaccagtcccaagactagaaggaaagtgtcccagagcttgagtcttccaggcttacagacaaaaccagagtggagcacagttggtacttacaagtctctctttcctccccacagtggactttctcaaactggggtattgacctctgatgaaccgccatgcaaacccgtgcctttcaacataaaaagaagcccttcgaggtgctcaccttcaagcttgctagaggaggaggaagagcaggttgagtttgacataactagaatgggttgagcctttccagcagagtaaggttctttcatggtggacagtggccacccactgccatttctacaagaagattttgcttcttaggcactgagttcctggttctttcactagagaaaaatgagtaggttggcaatccagtacttccatcttctgtgaagacctgggcaggcaacgggggcttgggggcgggggcagggaccaaagacaaggctgccatttgctgtgcccaccacagagggacatttactccacctgaagcacaagtattttctcagtgatgttggctcctacaaagtcaaaaggggtaggctccctggcttacgctccaggagtttggactgaaagggacactaaaagtgtcttcctctaagtttatgatgttgccctcctctggctacaacagtgctctggccataagcatcccaggttctctgaatgatggtgggtatggaaatgttcccaaacacaggtatggcggtgtcccctcccactgtaccaatctatgcccagggctggaaggtccgtggtgctctgaactggattcataaacagtagcatctccaaccacaagtgtggtgtcaggccctccaacagtagcacatgtgctcccgtgggtgcctgatagaaagtgggaacatgtgtttattagccaggtgggccccaaatgctctgacgaggtgcagaaagaggactctttgtcacagttgtgctgtgccctcccattgcaacacatgtgctctgaacaggtggagcccaggtgctttgcatgtaggcggacacaagagggcctctaagcacaagtgtggtgttggaaccctcaaggctaccgatgcattctggccaggtgtgtcccaggtggtctgactatagacagcaacagaattatctccagcaccgttatagagatacccgtccaactgatgtgctctagcgggatgggacccgggtgatccgaacacaaggaggaacagaagtttattctgatatatgctccttcttagcgatgttatctccttcaatagtaacaggtatgctttggctgggtgggcctcagtcactctgtagccaggaaggaaagggctcccaaaacagatttctgctccgtagagctgatcttccctcattgcaacagggatgctataggcaggcaggacctggtgctcaggtctaagcccttcctagaataagttgtggttctgagtgttgtcagcccttctgcagatttcaatgacccctgacaaggagccagggtttgggacagacacaatgactgcaaacctgccaccacccaaaggggcttagatattgatggtgcatggcactgctgcagtggccctttatcttgatcccctttttttttgagacggagtttcgctctgtcgcccaggctggagtgcagtggcgcgatcttggctcactgcaagctccgcctccagggttcatgccattctcctgcctcaggcctccacctctcaggttcaagcgattctcccgcctccgcctctgcctcctgggttcaagcaaacctccgtctcctggatccaagtgattctcctgcctcagcctcccaagtagctgggactacaggtgtgcgcaaccacgcccagctaatttttgtatttttagtagagatggggtttcaccatg[132 bp omitted]cagatggcccatatagcgctcctgctattgaaggagcgcagatgtcgctcagatagcgacaggaagagaagtcagtttccccctgcaggtaggatcagtacttttcctaagtggctgcacttctttgaggtgcaagcatacagtgctgtctttctgagagccctggcatgacaccaaggggaggcccccttctgatgtaaacactgagcttgctgggttgcataaggcctctcaggggtgatataaaccgagggggtaaaggtgaccgtgttgctcccaggaactgttttcagaagatgcacaggtgcagcaggaggattcctgccagaagcaggaacagagagggcagggagaaaaaggaggatggtggcctgggggccaggcggggtgaggcttactgaggaagttgtccgtgaagagcagtttgtgtgctgtctgacactgagagtctagtaagaaatttggagaggtctcctagctgcatgttcctccaaggcaaaccatgctggatgtttgtgacatgtcattggaacacacaccagagaaagtgtgtgctagagcagagagggaagacaaggcaccaaaggacaaaggggaatcccagcaggacttttgagagcttgagacagctcatgctctttgcaggtgcttggcaccaggtgtgcccgatgacatggaaaagcatccaggactgtgtattataggaccccacataactgtcacccccagatcaccaggtctgcaggctcctcagcatctaacctaggggcagcaactagtgcctgtgagtctcctagcccttttctctggggttattggaggtcagaggtcagagcgccctagatcctgccaggaaggggccctggctcacaggaggtcagggtaggagaggtgggggtgtggccagcagggatcaactctgtctcatgccattactggtgcacccaggtggcccagcagggctgcagctgcaagacacgtgctctgatggggaggagagaccaagcagtgtggggcgtgatttgccctgacctcttcctttcaggcaacctctgcagaggacactagtttacccccacaatgtccccttcccatgtggtagctcagggttaccacacactgtttcctccagggatccctctagggcctctcaagtcttggagcaggcatatcttctctgtggccacccaggaaggtgtgggtccatgggcatgagatgtgagtccagctgggctgtgaaggtttctgagatgggtacttggcaccccaattttcccaggtcctgcaccccataccatcccttccaggcaagcagatcttccctcttttaacaaatttttcgaattgcaaacagcatttaggactttgcgccttcctcaggtcacccatgtgggcgtaagggagagtcaggatttgaactcagactgtctgattccagagtttatccattgaccacctgacagtggtgatgcctcatcatgtgtgtcacgtatttacatttttaaatagtccttagggtacttagcaccatgtacacctgtcatgagagtgttcactgcctgcatcagaagatgcagggtggagagcaccaattgtcagcacaaccatattgggcatttctctgctaaatgagtcttgcacaaaccacacagctgtctgtgaactatcttctcccaggtacaggacaggagaccacttaggtgcaagatacactctgtcttaagagccttatgctccaaggacaccaacatctcttgtgacaattccatagacctactttttaggatcctggctgaaattggcaatttactgatatcaaatagtgtactctatcaggatggtaaatagttccttatatttagaactcttttttttttttggacagagtttcactcttgttgcccaggctggagtgcaatagtgcaatctcagctccctatagcctccacctcccgggttcaagtgattatcctgcctcagcctctcgagtagctgggactacaggcatgcaccactatgcccagctaattttgtatttttagtagacactgggtttcaccacgttggtcaggctggtctcgaactcctgacctcaggtgatccacctacctcagcttcccaaaagcgtgagccaccgcgcccggcctttagaatgctttaattttctctcagagactattttgtggttgggaatgacaaattacagttcatgagctgaattctttccagtctgtttctgtaatgccaataaccttagaatggtgataagagttttcaaagtttgtagaaaagaggaaaggaaaaaaggaagaaaaacagaggaaaatatgcaacagagaccatatgcaatcttcagagcctataatatctactatctggtcctttacagaaaaatttgcctcttttgtgattttcagtgtataagtcttgtacagtatttactaatttatccttatgtgttttataagttttttgtatgctatcgtaaatggtatcttttacattttagttttcagtattcaccactggaaaatacagttgatttttatatattcaccttgtatgctagaactttgctaaattcactctttacttttaatagtttctttgtgaattccttaggatattctatgttcacagtcatgttttctatgaacaaagagagttttgcttcttcctttttatcctgtatgccttttatttttatttcttacccttatatttgctacaacctccagtaaaatgttgagaaaaagtagagatgtagacatagtttgccagtccctgatcttaggggaaaagtattcaacacggaattgagtcaaagtttgtggcatatgcacttaatcactcaaaagacatatcctctaattcctagtttgctaaaagatgtaagattgtgttaatttctttgcccattttgttaatttcttttagttcccacatctgagggagaacatgtagtatttatctttctgtgcctgacttatttcgcttaacacaatgttctccaggctcatccatttgccacaaatgacatggttttatttttttaacgactgaatagtattccattgtgtatacataatgcattttctttatccattatctgttggtggacatttagattgattccatatcttagctattgtgataagtgcttcaataaagataggggtgctaaccaagcacacaggcttaattagcttgacaattcttacacaaagtagagatttccgaaagacaccacattcattgagtaaattaggaaaactaaaacctgcctggcaagaatgatgaagaggcatatctgtggaggctttggatcttggtggaaaaaattaaaaggaaagaaatctctcccttgaaattcttaaccaaagtctctaccttctggagttagacatcatattatccaaacaattccatatcaatcattttgtgtaaagtagtactgagttggtagtggccccatatattacatctatacccacaaaagaattttttaaggacacatgggtacctctgtcacttgtcatctggttctcagtgttgacatggagcaatttgtaatctaaaaaacctgcagtcttatctaacaatactcaggtcctagggaaatatttctccatatctcttgcaatgagcctggtgtggtggtgcacctgtagtcccagatacagagatgaaaggatcacttgagcccaggagtttgaatccagcctgggcaacatagaaagaccctatctcttaaaaaaaaaaaaaggcaatgaaagaaattgaaaaggaaacaaacaagtgtcaagacatcccatgctcatgtattggaataattaataatgttaaaattagcatactacccaaagcaatctatagaatcaatgcaatccctatcaaaatatcaatgacatttttcacagaaacagaaaaagaattctaaaattcatatagaaccaaaatatcccaaatagccaaagcaatgctgagcaaaaatgacaaatgtagaggcatcacatttcctaacttcaaaatatacaacaaagctatagaaaccaaaacagagtggcattggtatgaaaggggaaacatagactaatggaacacaatagagaacccagacataaatccgtatatttacaaccaactgatttttgacaaagtgccaagaacatacattggggaaaggacaatgtcctcaataaatggtgctgggaaaactgaatatccgtatgcagaagaatgaaaccagatgcctatttctcaccacacaaaaaatcaactaaaaatggattaaaggctgtaagacccaaactagaaaaccactaaaagaaaacataggagaaatgctttaggacattagtttaggcaaagatttcatggctaagacttcaaaagcacaggcaacaaacatatagacaagtggcaatatattaaaccgaaaagttcctgcccagaaaagtaaacaatcagcagagtgaggagacagcctgtagaataggagaaaatctttgcaaactattcatctgacaagagacatatccagagtatacaaggaacacaaacaactcaacagcaaaaactcaaatcatccaactaaaaggtggtctataaattgaatagatatttctgaaaagaagatatacaaatgaccaacaggtatatgaaaaatgctcaatatcgctaatcatcagggaaatgaaaatcaaaagcacaatgaaatgtcatctcaccctggttagaatggctgaaagaaagaaaaaataaatgctggtgatgctgcagagaaaagagaaatctttttttttgttttttgagacggagtctcactctattgcccagggtggagtacaatgatgtgaactcagctcacagcaacccctgcctcctgggttcaagtgattatcctgcctcagcctcctgagtagctgggattacaggtgtctgccaccacacccagctatttttgtgtgtgtgtattttagtagagatggggtttcaccatgttggccaggctggtcttgaactcctgacctcaagtgacctgccctagtcggcctcccaaagtgctgggattacaggagtgagccaccatgcccagccagagaaaaggaaactcttatacactgttggtggaatgtaaattagtacagccatttactaatacagtatggaggtttctaaaaaaaaaataaaaatagaattactatatgatccaggtatcccaccactagatatttgtctaaagaaatggaaatcactgtataaaagggatacctgggaggggttccaagatggccgaataggaacagctccagtctacagctcccagggtgagcgatgcagaagacgggtgatttctgcatttccaactgagctttgaagagagtagtggttctcccagtacggagtttgagatgtcagaatggacagactgcctcctcaaatgggtccttgacccccgagtagcctaactgggaggcacctcccagtaggggctgactgatacctcatatggcccagtgcccctctgagatgaagcttccaggaggaacgatcagacagcaacatttgccgttctgcaatatttgctgttctgcagcctccactggtggacctgcagcaaactccaacagacctgcagctgaggtcctgactgttagaaggaaaactaacaaacagaaaggacatccacaccaaaaccccatctgaacgtcaccatcatcaaagaccaaagatagataaaaccacaaagatggggagaaaccagagcagaaaagctgaaaattctaaaaatcagagcgcttcctctccttcaaaggaatgcagctcctcgccagcgatggaatgaagctggacggagaatgactttgactagttgagagaggaaggcttcagacaagcagtaataacaaactcctccgagctaaaggaggaagtttgaacccatggcaaagaagctaaaaaccttcaaaaaagattagatgaatggctaactaggataaacagcgtagagaagaccttaaatgacctgatggagctgaaaactatggcatgagaactacgtgatgcatgcacaagcttcactagccgatttgatcaactggaagaaagggtgtcagtgattgaagatcaaatgaatgaaatgaagcgagaagagaagtttagagaaaatagagtaaaaagaaatgaacaaagcctccaagaaatataggactatgtgaaaagaccaaatctacgtctgattggtgtacctgaaagtgatggggagaatggaatcaagtggaaaacactcttcaggatattatcaaggagaacttccccaacctagcaaggcaggccaacattcaaattcaggaaatacagagaatgccacaaagatactcctcaagaagagcaactccaagacacataatcatcagattcaccaaagatgaaatgaaggaaaaaatgttaaggtcagccagagagaaaggtcgggttactcacaaagggaagcccatcagactaacagcagatctcttggcagaaactctacaagccagaagagagtggggaccaatatttgacattcttaaagaaaagaattttcaacccagaatttcatatccagccaaactaagcttcataagtgaaggagaaataaaatcctttacagacaagcaaatgctgagagattttgtcaccaccaggcctgccctacaagagctcctgaaggaagcactaaacatggaaaggaacaactgatatcagccaccgtgaaaacatgtcaaattgtaagaccattgatgctaggaagaaactgcatcaactaacgagcaaaataaccagctaacatcataatgacaggataaaattcacacataacaatattaaccttaaatgtaaatggctacagacacagattggcaaattggataaagagtcaagacccatcagtgtgctgtattcaggagacccatctcaggtgcagagacacacataggctcaaaacaaagggatggaggaagatctaccaagcaaatggaaaacaaaaaaaaagcaggggctgcaattctagtctctgataaaacagactttaaaccaacaaagatcaaaagagacaaagaaggccattacataatggtaaagggatcaattcaacaagaagagctaactatcctaaatatatatatgcacccaatacaggagcacccagattcacaaagcaagtccttagagacctacaaagagacttagactcccacacaataataatgggagactttaacaccccactgtcaacattagacagatcaatgagacggaaagttaaaaggatgtccaggaattgaattcagctctgcaccatgcggacctaatagacatctacagaactctccaccccaaatcaatgatatacattcttctcagcaccacaccacacctattccaaaactgaccacacagttggaagtgaagcactcctcagcaaatgtaaaagaacagaaattataacaaactgtctctcagaacacagtgcaatcaaactagaactcaggattaagatactcactcaaggaggagccaagatgcccgaataggaacagctcctgtctacagctccagtctacagctcccagcgtgagcgacgcagaagacgggtgatttctgcatttccagctgaggtaccgggttcatctcactagggagtgccagacagtgggcgcaggtcagtgggagcgagcaccatgcgcgagccgaagcagggcgaggcattgcctcacttgggaagcgcaaggggtcagggagttccctttctgagtcaaagaaaggggtgacggacggcacctggaaaatcgggtcactcctacccaaatactgcgcctttccgacgggcttaaaaaacggcgcaccacgagaatatatcccgcacctggctcggagggtcctacgcccacggagtctcgctgattgctagcacagcagtctgagatcaaactgcaaggcggcagcgaggctgggggaggggcgcccgccattgcccaggcttgattaggtaaacaaagcagccaggaagctcgaactgggtggagcccaccacagctcaaggaggcctgcctgcctcagtaggctccacctctgggggcagggcacagacaaacaaaaagacagcagtaacctctgcagacttaaatgtccctgtctgacagctttgaagagagcagtggttctcccagcatgcagctggagatctgagaacgggcagactgcctcctcaagtgggtccctgacccctgacccccgagcagcctaactcggaggcaccccctagcaggggcacactgacatctcacacggcagggtattccaacagacctgcagctgagggtcctctctgttagaaggaaaactaacaaacagaaaggacatccacaccaaaaacccatctgtacatcaccatcatcaaagaccaaaagtagataaaaccacaaagatggggaaaaaacagaacagaaaaactggaaactctaaaaagcagagcgcctctcctcctccaaaggaacgcaattcctcaccagcaacggaacaaagctggatggagaatgactttgacgagctgagagaagaaggtgtcagacgatcaaattaccctgagctaggggaagacattcaaaccaaaggcaaagaagttgaaaactttgaaaaaaatttagaagaatgtataactagaataactaatacagagaagtgcttaaaggagctgatggagctgaaaaccaaggctcaagaactacgtgaagaatgcagaagcctcaggagccgatgcgatcaactggaagaaagggtatcagcaatggaagatgaaatgaatgaaatgaagcgagaagggaagtttagagaaaaaagaataaaaagaaatgagcaaagcctccaagaaatatgggactatgtgaaaagaccaaatctacgtctgattggtgtacctgaaagtgatggggagaatggaaccaagttggaaaacactctgcaggatattatccaggagaacttccccaatctagcaaggcaggccaacgttcagattcaggaaatacagagaacgccacaaagatactcctcaagaagagcaactccaagacacataattgtcagattcaccaaagttgaaatgaaggaaaaaatgttaagggcagccagagagaaaggtcgggttaccctcaaagggaagcccatcagactaacagcggatctctcagcagaaaccctacaagccagaagagagtgggggccaatattcaacattcttaaaagaattttcaacgcagaatttcatatccagccaaactaggcttcataagtgaaggagaaataaaatactttacagacacgcaaatgctgagagattttgtcaccaccaggcctgccttacaagagctcctgaaggaagcactaaacatggaaaggaacaaccagtcccagccgctgcaaaatcatgccaaaatgtaaagaccatcgagactaggaagaaactgcatcaactaacgagcaaaataaccagctaacatcataatgacaggatcaaattcacacataataatattaactttaaatgtcaatgtactaaatgctccaattaaaagacacagactggcaaattggataaagagtcaagacccatcagtgtgctgtattcaggaaacccatctcatgtgcagagtcacacatcggctcaaaataaaaggatggaggaagatctaccaagccaatggaaaacaaaaaaaggcagggattgcaatcctagtctctgataaaacagactttaaaccaacaaaattcaaaagagacaaagaaggccattacataatggtaaagggatcaattcaacaagaagagctaactatcctaaatatatatgcacccagtataggagcaccaagattcataaagcaagtcctgagtgacctacaaagagacttagactcccacacattaataatgggagactttaacaccccactgtcaacattagacagatcaatgagacagaaagtcaagaaggatacccaggaattgaactcagctctgcaccaagcagacctaatagacatctacagaactctccaccccaaatcaacagaatatacatttttttcagcaccacaccacacctattccaaaattgaccacatagttggaagtaaagctctcctcagcaaatgtaaaagaacagaaattataacaaactatctctcagaccacagtgcaatcaaactagaactcaggattaagaatctcactcaaaaccgctcaactacatggaaactgaacaacctgctcctgaatgactactgggtacataatgaaatgaaggcagaaataaagatgttctttgaaaccaacgagaacaaagacacaacataccagaatctctgggatgcattcaaagcagtgtgtagagggaaatttatagcactaaatgcccacaagagaaagcaggaaagatccaaaattgacaccctaacatcacagttaaaagaactagaaaagcaagagcaaacacattcaaaagctagcagaaggcaagaaataactaaaatcagagcagaactgaaggaaatagagacacaaaaaacccttcaaaaaattaatgaatccaggagctggttttttgaaaggatgaacaaaagtgatagaccactagcaagactaataaagaaaaaaagagagatgaatcaaatagacgcaataaaaaatgataaaggggatatcaccaccgatcccacagaaatacaaactaccatcagagaatactacaaacacctctacgcaaataaactagaaaatctagaagaaatggataaattcctcgacacatacactctcccaagactaaaccaggaagaagttgaatctctgaatagaccaataacaggagctgaaattgtggcaataatcaatagcttaccaaccaaaaagagtccgggaccagatggattcacagccgaattctaccagaggtacaaggaggaactggtaccattccttctgaaactattccaatcaatagaaaaagaggaaatcctccctaactcattttatgaggccagcatcattctgataccaaagcctggcagagacacaatcaaaaaagagaattttagaccaatatccttgatgaacactgatgcaaaaatcctcaataaaatactggcaaaacgaatccagcagcacatcaaaaagcttatccaccatgatcaagtgggcttcatccctgggatgcaaggctggttcaatatacgcaaatcaataaatataatccagcatataaacagagccaaagacaaaaaccacatgattatctcaatagatgcagaaaaagcctttgacaaaattcaacaacccttcatgctaaaaactctcaataaattaggtattgatgggacgtattccaaaataataagagctatctatgacaaacccacagccaatatcatactgaatgggcaaaaactggaagcattccctttgaaaactggcacaagacagggatgctctctctcaccactcctattcaacatagtgttggaagttctggccagggcaattaggcaggagaaggaaataaagggtattcaattaggaaaagaggaagtcaaattgtccctgtttgcagacgacatgattgtatatctagaaaaccccattgtctcagcccaaaatctccttaagctgataagcaacttcagtaaagtctcaggatacaaaatcaatgtacaaaaatcacaagcattcttatacaccaacaacagacaaacagagagccaaatcatgagtgaactcccattcacaattgcttcaaagagaataaaatacctaggaatccaacttacaagggatgtgaaggacctcttcaaggagaactacaaaccactgctcaaggaaataaaagaggatacaaacaaacggaagaacattccatgctcatgggtaggaagaatcaatatcgtgaaaatggccatattgcccaaggtaatttacagattcaatgccatccccatcaagctaccaatgactttcttcacagaattggaaaaaactactttaaagttcatatggaaccaaaaaagagcccgcatcgccaagtcaatcctaagccaaaagaacaaagctggaggcatcacactacctgacttcaaactatactacaaggctacagtaaccaaaacagcatggtactggtaccaaaacagagatatagatcaatggaacagaacagagccctcagaaataacgccgcatatctacaactacctgatctttgacaaacctgagaaaaacaagcaatggggaaaggattccctatttaataaatggtgctggaaaaactggctagccatatgtagaaagctgaaactggatcccttccttacaccttatacaaaaatcaattcaagatggattaaagacttaaacgttagacctaaaaccataaaaaccctagaagaaaacctaggcattaccattcaggacataggcatgggcaaggacttcatgtctaaaacaccaaaagcaatggcaacaaaagccaaaattgacaaatgggatctaattaaactaaagatcttctgcacagcaaaagaaactaccatcacagtgaacaggcaacctacaaaatgggagaaaattttcgcaacctactcatctgacaaagggctaatatccagaatctacaatgaactcaaacaaatttacaagaaaaaaaacaaacaaccccatcaaaaagtgggcgaaggacatgaacagacacttctcaaaagaagacatttatgcagccaaaaaacccaggaaaatatgctcatcatcactagccatcagagaaatgcaaatcaaaaccacaatgagataccatctcacaccagttagaatggcaatcattaaaaagtcaggaaacaacaggtgctggagaggatgtggagaaataggaacacttttacactgttggtgggactgtaaactagttcaaccattgtggaagtcagtgtggccattcctcagggatctagaactagaaataccatttgacccagccatcccattactggatatatacccaaaggactataaatcatactattataaagacacatgcacatgtatgtttattgcggcactattcacaatagcaaagacttggaaccaacccaaatgtccaacaatgatagactggattaagaaaatgtggcacatatacaccatggaatactatgcagccataaaaaatgatgagttcatgtcctttgtagggacatggatgaaactggaaaccatcattctcagcaaactatcgcaaggacaaaacaccaaacaccgcatgttctcactcataggtgggaattgaacaatgagaacacatggacacaggaaggggaacatcacactccggggactgttgtggggtagggggaggggggagggatagcattaggagatatacctaatgctaaatgacgagttaatgggtgcagtacaccaacatgtcacatgtatacatatgtaacaaacctgcacattgtgcacatgtaccctaaaacgtaaagtataataacaaaaaaaaagacaggtgtaagaaattataaaagtattaattttgggaactgataaatgtccatgaaatcttcacaatttatgttcctctgctgcagttccagccagtccctccattcggggtccctgacttcccacaacaacacacttcatggggggacatagggtgaactactacacttcaccaaccagccaggacacattccacacatcaagctctgagagggatggcagatggtcatcctccaggtccagagctatgcccactggcaggacatcaccaggcaccgcatggaggtgatcagcaacttttcccagcagcacttcctcggggaggtggattaccttgtgtgtgcagatgtggacatgaagttcaacaaccatgtgggtgtggagatcctctcttccctgtttgccaccatccatcctggcttctatgggttccatcgggacacctttgcctatgaatgccagcctcagtcccaagcccattttcctgagggtgaaggggacttttattatataggggccttatttggtgggtcagtgctggaggtttacaggctgatcatggcctgtcaccaggtgatgatgattgaccaagccaaccacatcgaggccctgtggcatgacgaaagcctcttaaacaagtacctgcttaaccacaaacccactctcccttgagtacatgtgggattaaaaagtcgatggagtatacgttggatgaatacctggtgggtttgtgcaccatgataaactgcaagagatctgtggtcttggtaaataacaatgaggaaatgtgaactgatgagggaagcttccagaaagagaccagagagggggtgattgccagtcagcccgtatcttcctcctgaaatgctaccctgatttaaaatcagctttacaataaagagtatgactccacctattttcgtctggttataaaaaattgctaatgcctctcatcatctcctcaaatttaggaggccccagcacaaccccgctaccacaaccaccaccctatacacacatttaggcaggccttattccacagctcatgcacacgtttttcagtttcacccccttgagcttctcactgtgttctcctaaaacactcttcggggtggaggaggtgagtggtgtctgcccgtcctgacagataagggatctgtgatgagatcttttccagagcaaggaatcaggccccttaataaagaagagtaggctgggtgcagtgactcacgcttgtaattccagcactttgggaggtcaaggtgggtggatcacctgaggtcaggagtttgagaccagcgtggccaacacggcaaaacgctgtctttataaaaatacaaaaattggctgggtttgatggcgggcacctgtaatcccagctacttaggaggctgaggctgaagaattgcttgagcctgggaggcggacattgcagtgagccgagactgcgccactgcactccagcctgagcaccagagtgacactctggtctaaaaaataaaaacataaagaagagtagatttgtgatcttggcacagaatgactgtgtaatgcaaatccaatcagtgaggcatccagaaatggctcagagaggagcgatgtcccagcagcctgacccctccccctagtgtggtgtcctaaattgggttagtccatttgcattgctataaagaaatgcctgaggctgggtactttacaaagaaaaggtttacttggctcatgattctgcaggctgtgcaagcatggcaccagaatctgctctgcttctggtgaggtttcaagaagcttccaatcatggtggaaggcagaaggggagcaggtgtgtcacatggcaagagaaggagtgagagagtgaagggggaggacccaggctcttataaacaaccagctctctctcatgtgaactacgagtgagaactcatttttgtcatggggagggcaccaagccattcataaaagattcacccccatgacccaaaccctcccactaggcccagttccaacactgggggccacattgcaacatggatttggagggaacacacatccaaaccgtatcataaaagcagttttcacagaaagcatgtaactctgcctccttttcctatctgattgagaaaaaaaattctgaggcctcacaccacccccaaatttaggcaggcctaatacgatgccatcctctagtctcccaccaacaccaaacacacactttcacacaaataagaaacacacttttttttttttttgagatggagtctcgctctgtcgccaagctggagtgcagtggcgcgatcttggctcactgcaacctctgcctcctgggttcaagtgattctcctgcctcagcctccctcccgagtagctggaactacaggtgcgtgctaccatgcccagctaatttttgtacttttagtagagatggggtttcgccatgttggccaggatggtctcgatttcttgactttgtgatctgcccgcctcagcctcccaaagtgaagaaacacatttaggcagacctgacttctggactcaggctcaagttcctgagttgccaccaccttgagctttttaatgtgcattcccagcttccttcagggtggatgcagtgtgtggtctcagcccaacctgggatataaggaatcagagatgagatctattccagaacaaggaagagcctcctggacacagtctcctgcctcctgtgacagtcacacaagggcctgtctctgcccttggccaaactgatgcacaaaggtcttcagctctaaatcaaattacttcctcttgttagagtccttgtaaaagctgaaaggccgtttagtgtgcagaagaacgtgatgccaaataaaaccctctttcctggcactgaagttcttgtttatcccaaaatattgccagctgtccaccaggggcaaagcgggtctctctcactctccccccacccactgatggactccatgccacctccattgatcaatttagtaacttattaaggacttgccagctctttaaaaactgaaaaaaaatatatttctagatgcaaataagaatcaattcaaattattacaaaaacttgcctcttaaaaaatttgttcattgtccttcagcaaaggcctgaaatcctacatggcaggtatctgaaatccagcattttcttgtcttgctttcttttggacatatcaggacaaacagtttgtccatctttctgttaggttttgaa[131 bp omitted]gaaaccctgtctctactaaaaatacaaaaattatcaggacatggtggcacgcgcctgtagttccagctactcaggaggctgaggcaggagaatcgcttgaacctgggagatggaggttgcagcgagccaagattgtgccactgcactccagcctggcaacagagcgagactccatctcaaggaagaaagaaaggaagaaagaaagaaaggaagaaagaaaggaagaaagaaagaaagaaagagggagggagggagggagggagggagggagggaaggaaggaaggaagaagaaagaaagaaagagaaagaaaaagaaagaaaggaagaaagaaaaagaaagagaaagaaagaacgaaagaaagaaaagaaagaacgaaagaaagaaagaatggcgggcaggaaggagggagggaagcaaggaaggaaggaaggaaggaggagaaagacacagagagagagagagatggtggctctactgcaatgtaggttttatttggaggtgggggaccagcttaatgcgagggcgcactgctgcttacagctagtgcaattagatgcctgggtaggggtctgggggggtatggcttactacccaggaggatattgataagatgttcccataatgaggtggtttggccctttttctggcaggatgtgataatgaggtcccttggacttttttcccagcaagatgtgataagaaattcaggtggttagggcggggtgcagtggctcacgcctgtaatcccagcactttgagaggccgaggcgggcggatcacgaggtcaggagatcgaggccatcctggctaacctggtgaaaccccgtctctactaaaaatacaaaaattagccaggcgtggtggcgggcgcctgtagtctcagctactcaggaggctgaggcaagagaatggtgtgaacccgggaggcagagcttgcagtgagccgagatggcgccactgccctccagccattgctggaacacgaattaaaagaaattaaagaatgtgtaagcaaaaactcagctatatataaaaaaacccaattccccctgaggaggagaaagagctggagtccttcaaaattagctgcctgtttttccttctgtggctagtgagccttaactctccctttcccagacattgtgaagaccctgtttagctgtgcagctgcaaggtcactagacagataatcttaagtcttaatacatgtcgttccttgaaaagtaagaaataatgtaatgcatgtctcaattaaataactctctttgtttctggcttctgtaatatgcttccccctgcacagatctgcccccaccccacgaaatgcttaaaaggtagcttaactctttgttcagggctcagtcctttggatgttaatccgactaggtcagtgcacttaaataattaaataattcctcctcaacccctcggcctaattccttaattatcctgcagcagggtgacagagcgagactctgtctcaaaaaaaaaaaaaaaaaaagaaagtcaggtggttgggcagaatgtttctcacagcccgaacccctgtggaatgtttcactttgaccaaggtctgtgaaatggtggggggcttacaaaataatgcggtttggactaatgctttccttgtttttcacggccttggtagtcttcaagaggcctggccaggtggaatgccccccagtctgagtttgtctggtgcttccttaccatgagactggggtcttggagttttgaggttttggaaagacacctcagaagttaagtatctttcttgtcacattgcattaggggggtacatggtatcaatatctcttttctctggtgatgtaaaacttgatcatttgaataatgtagtctttcatggtttttttatccactgtaaagttgctatgtgttcctccctctactgtagtctttggaaaggagtcaccaagtcagcccacccttaaagagggagaatatttagtctccacctcccggaagaaggagcatccatatgtattatttgcaatttgtctgtaagataggtttgtctaccccattaaaaagtgggcaaaggatatgaacatacacttctcaaaaaaagacatacatatggccaacaaacatgggaaaaagagctcaacattactatcattaaagaattgcaaatcaaaaccacaatgagataccatctcatgccagtcagaatggcgattattaaaaagtcaagaaacaacaaatgctggcgaggttgcagagaaataggaatgcttttactctgttggtgggaatgtaaattagttcaaccattgtggaagacagtgtggcaatccctgtaagatttaggaccagaaataccatttgacccagcaatgccattactgcgtatatacccaaaggaatataaatcattctactgtaaagatacatgtatgcatacatatgttctttgcagcactatttgcagtagcaaagacatagaatcaatctaaatgctcatcaataatagactggataaagaaaatgtggtacatatataccatggaatactatgcagccatagaaaggaattagatcatgtcctttgcagggacatggatgaagctggaagccattattctcggcaaactaaggcaggaacagaaaaccaaacactgtatgttctcacttataagtagcagctgaacaacgagaacatatggacagggggaggggattaacacacactgggccctgtcaggggagggtgtgaggggagagcattagggaaaagagctaatgcatgctgggcttaatacctggatgatgggttgataggtgcaacaaaccaccctggcacacgtttatttatgtaacaaacctccacatcctgcacatgtaccccggaacttaaaaaataaataaaataattatttttaaaaagatatatttgcctcttcttggctgagtgtggtggctcatgcctgtaaatccagcactttgggaggccaaggcaggcggatcacttgagtccaggagtttaagaccagcctggccaacatggtgaaatcccatttctactaaaaatacaaaaattagccaggtgtggtggcttgcacctgtaatcccagctacttaggaagctgaggcatgagaatagtttgaacccaggaggtggagtttgcagtgagctgagatcgcgccactgcactccagcctgggcggcagagcgagactgtctcaaaaaaaaaaaaaaatttgtcctttctttcttgtttacttattcatttatttatttatatagttatggacttatgtgtcttattttaaactttgggtattaatccaataactttgggttattttggtgtgcatatctttccagcttgggccattaggagctcttcaaagaagatttctttctgtcagaggatttttgttttgttttgttttgtttgagacagggtctcaccttgttgcccaggctggagtacagtggcgtgatcttggctcactgcaacctccgcctcctgggttcaagcgattctcttgcatagcctctcaagtagctgggactacaggggcacatcactacgccaagctaatttttgtattttttgtagatatggggtttcaccatgttgcccaggctggtctcaaactcctgggctcaagcaatccacctgcctcggcctcccaaagtgctaggattacaagcgcacctgtcagagttttcagggacgtggatgaagctggaagccattattctatcttgtttgtgccatcacactcctctcctagggtagaaggtaaagttccacccttgagagagtttcaacagagccaagtttctggtctgtaggccctcaggtcccgtagtgacctctgggaagtgaggcgggggagggcagctgatcacagggggtccctcagagcctctggtgcaggtcgtgagtcacacacactccgctcgctggcatttctggacagcctctaaagctcaagcccacttagggtcatgttcgccaatggaaaaaggcgagactgccagaagggatgagactggctcccctaggaatcaagaactcccaagaatttgttcctttaagagtgagcagaaagttgctggcagaatttgacaactgaattgtggtaggtagaatggagcatgaccagccctggagtcaaccaatatggctgcaagtcctggaacttccctggcagtgatgggctcagaggccaaaagatagcatccacctggccttgaggcctgatgcggaggatgcagctggtaagatgttcagggggccctggtcaggcccacatcccccatactttcctccaggactcaaactaaggccaaagccagttttctctgaccggcctgttgtggtgtacacctgtccttgcctccccactgacttttagctccacattttgggtgagtcttgcatgggaagttagtacaggtgggagaaggatgtgaccaggatgcaaaggtgacagtcggggctgggaaaacataacgattttaatgtttctaaaacggagctgacagacaattcacaggacgaggaggtttcttcacagaaacccaaactcagatgctgcccctctctgggttcagccccagcatgccctcaagcacctcgcatctccttcctgccccagcccgggcaggcgctcattctcctgttactgggtcatgagggagccgtcctcatcctaatctgtctgacattagccccgtctccacactgggctggttctcactgaggtctgcacggaatgaccaaggagaagatttcatccttgcagatgaggagtgggtgatcctggggaatgggaaccctgctgtgggcccaggacttttgcaggagccctttggtcctcctagtcagactttctgatttagttttcaccaggctgattccagtaaaacaactgcaactcaactctcagagcccagggacggtgtcctgtgtgtggcgcgtgggaggcccagcaggagatcttgggacatggtgaggggttgtgacacgtgaggccattgagaacatgtggactggaattaggcagagccaggataggtctaggccctgccgctgactagctgtaggatcataggtaagccgttttatctttctgaagctctgtcctcatttgtaaaatgaggacccagctaaataacatacatgtcaccccaggattcatcagccttgggaggttacaatgacatcaacagccatagaaagcctttctctggctctgcctttattggagctgcagagtctgcaggccctggaaggcctggttgaaaagtgactctagaaatgacctgcatgagctcatcacaagcccttttaatttaatctcttcgtagcgtctgtgattttctgctattttcctgaggaggctgaaatttctgcaaagacgctctccatagatgctgagcatagaggcttcggttgcttctgcattctactactgggaccaggactcccacctagtcttggcccaggaggaaggaagaaagagagtggagggagaagctaacgtagagggagtgttggtgtcaggtacttgtaggatctgccacctggggcaaattacaagatgccactgagcctacttccaaatgcatcgaacagggccactttatctcccagcaggccagtcatggggctaaggtgtagagactaggttaggtgagttgtgtgtgactgaaagacagaaaccaggtttcacctgcacttttacagagagtagagcagtgccaggctccagtgagtatggcccacaaaaaagtgggaaaataagtagtgtctctattgtctgagtcttgctggcataattaggtctcatgcagagagttaaacttgggacttggggctaagaggcctgaggcttgagttccggccctcgtctgacctgctggacaaacccaggcattgtgcttcatttgtttactcattttaaagcttgattttacatctaccaagtgctgggcactctgctagacttaacattagatgtacatattatactgaaaggtacagcattttactgagaagtacaacatgaaatttgaacagatgaagaactaaattgcgctcttgtatggcgtgagtccaccttgtagggatgttaactcttcccagctcatctttgtttcaaaggaaattaatcaagtttatccaaaagaataaatgcttgaaatcagtcaagaaaacttagtgtctgggatttacatgaggaagaattcaaaggttgcgtggattagaaagggaggcatccagaatgatgaggaaatcaggagtagatgaaaatatctattatttggcaaccctaataaggtataataaatattaaagaaacaagtgacacagtttttacctgtcaaatttgaaaaataaaaatatattctgagcacataatttcataaagaagagtacatatatctccacactcacatactcttgtggggatgaaaataga[137 bp omitted]tggcgaaaccccatctctactaaaaatacaaaaaaaaaaaaaaaaaaaaaaaaaagctgggcacggtggcgggcgcctgtagtcccagctactcgggaggctgaagcaggagaatggcgtgaacccgggaggcggagcttgcagtgagccgagatcgccccactgcactcccgcctgggggacagagcaagactccgtctcaaaaaaaaaaaaaaaagaaagaaaaaagaaaaaagaaaagaaagtttttaccttatcattaaatagttatttcataaatacatcatttcaaaaattatctcataaataaatcctaagaaaataaacatagcaaaattaaaagaaacctacttaaaagtgaaataataagaatggtgggacgtatttgtagtcattgaaaataatgcttttgaagaccatttaaagatgtgaaacatgctaatgtaaaataaacataaaatgtaaaagacaaagtatgaaacttaatatttattttaatttaaaaattagaatacatatgtattgacaaaggtaaaacagatgaaactgtgagatcatctatggtagtgggattctggaaaattgttgttttccttttttttcaacctttttgtattttctcagttttaattgagcttgtgttacttttacagtttgaaaagaaaaagggggcggggagaaaaaaccaccaccggcaagacagtgggagggaaaaaaatcagtaatctatttttatgcagacaccaggcattttctgtttgaggttaattaccaagtttatttaactagaattccattctaatcaaatgttcatctgtgagaatgtcctgatatattttcttctgttttaatcttctgctagtgacatattataacaatgtatgtaagatactgaacaagaaagagaaaaaggcagtccttgggtttggtgcac[132 bp omitted]cggtgaaaccccgtctctactaaaaatacaaaaaaatggccgggtgtggtggcgagcacctgcctgtagtcccagctactcgggaggctgaggcaggagaatggcttgaacccgggaggcggagcttgcagtgagccgagatcgcgccactgcactccagcctaggcgacagagcaagactccctctcaaaaaaaaaaaaaaaaaaaaaatttaaaaaccaaattaattcaataggattttgtgctttgcgcttcccctggtctccacagaactgtgacacagcgtactgaggaaactctttgccttacactaaacctcacaggtcctgaacaatcaagagctttgagaagatacacaactctgacggcttctggagagagcatgtctctctttcccctgggctccatgccagcttgccagaatttttacaatttgttttcctcatttttctaattatgtttcctcctgaaagtgattatagatagaattcatttgtatttgtggagacttctttatcagatcagcaagttttcctttttttacgagttaatactttcatctttagggttctcagggaatacacagcatatgtcaaaacaaaaatgagatgaaaattcctaggtaattttttttttacttttattttaagttcatgggtacatatgcaggtttgttacatacgtaaactcgtgtcacgtgggtctgttgtacagattattttgtcacccaggtaccaagcctagtacccaattgttactttttctaatcctctccctcctgccaccctccaccttccaataggctccagtgtgtgttattcccctctttgtgtccgtgtgttctcatcatttagctaccacttataagtaagagcatgcggtatttggttttctgttcctgcattagtttgctaaggataatggcctccagctccatccatgttcccataaaggacacaatcttattcttttttgatgactgcgtggtatcccatattttccatcatatgtatcacattttatttatccagtctgccatcgatggacatttaggttgattccatttctttactactgtggagtgctgcaatgaatacatgtgtgcatgtgtctttatggtagaatgatttatatccctttgggtagatatccttactgggttatttatgcctaccaccaggcaaaaataaaataaagaaaagggcttcagacgttaaagacttatcaatagaccttttttatatgaatgtgtatggctgtgtgtgtgtctcaatatactgttgcactggagctgctgctggtttttttaaattcacaagcccctttcacatgaaaacagtgttatggttgggtttccacaaagatctattcatatctgaagtatatctctctattttaaaaacgtttttattgctaaataaggcacatacgccaagaagagaaggtgttcacgtatatgaacactttaaggaataatagacaatgaacacctgtgaatccaccatgcaggtgagctcacggtgcagagccccctggatccctcctcacctgcatgcagtcctggtccaccctcctgcctctattctgcactttttattagtcatccttgcttttcaaaatagtttaataatgattgcatggctccacctataatttacttttatttgcttttcaccattagaaaagcagaatcaggcagggcatggtggctcacatctgtattcccagcactttgggaggctgaggcgggtggatcactggagtccaggagttcaagaccagcctgggcaacatggtgaaatgacgtctctactaaaaatacaaaaattagccgggcatggtggcacaccacctgtaatcccagctacttaggagtctggagcacgagaaccgcttgaacctgggaggtggaggttacagtgagctgagatcaggccactgcactccagcctgggcaacagagcgagactccatctcaaaaaaaaaaaaaaagataagcagaatcatactgtatatattcacctggaaccttttcttttgctctacattatgcatcaatttgtcaacttggagtttattcattttaatgtctgcgtagtatttttttgtatttacaatttatttattcattatactgttcccaagttcttgacattataaacagaactgtttgctggacacacccaatttttaaaaacttttaatatattttgtttaaaaaatgttttaacttttaagttcagggatacatgtacagaatgtacaagtttggggtttgttgtaaagattattttatcacccaggtattaagtgatacccaatagttatttttcctggtcctttccctccacccaccctccaagctccaataggccccagtgtgtgttgttctactctatgtgtccatgtgttctcatcatttagctctcacttacaggtgagaacatcagtattttgttttctgtttctgcattagtttgctaaagatatggcctccagctccatctatgtcccttcaaaggacttgatcttgttcctttttacagctgcatagtattccatggtatatatgtaccacatatgctttatccagtctatcattgatgggcatttgggttgattccatgtctttgctattgtgaatagtgatgcaatgaacatacacatgcatgtgtctttctttatagtaggacaacttacattcctttgggtatatacccagtaatgggactgctgggtcaaatggaatctccacaccatcttccaaaatggttgaactaatttacactctcaccaacagtgtataagtgttcctttttctctacaacctcactagcatctgttagtttttgactttttaataatagccattttgactggtgtgagatggcatctcattgtggagacacccagtttatccagggtttagaattgtagaagttaaattttctcattgtacaatatgtgcatattcagctttattaggcaatgttaaatgattgaattatccagcttttaaatttctgccacctaacagctcattctggttttaatttgcttgacttgcattaaataataaagttagatatcttttttatatttaatggctggtgttgtttggctgtgcctgacccaaatctcatcttgaattgtagctcccgtaatccccacatatcatgggagggacctggtgggaggtaattgaatcatgaaggtgggtttttcccatgtttctcttgtggtagtgaataaatctcatgcgatctcatggttttataaagggcagttcccctgcacatgctctgttgcctgctgcaatgtaaagatgtgcctttgctcctccttcaacttctgccatgattgtgaggcctccccagccatgttggaactgtgagtccattaaacttctttttctttataaattacctagtctgtagtatttcttcatagcagtatgaaaatggagtaatacaatggctacttgagttttcctttctgtgaaatgcctaatagcatatatttccccacatttctattggcctatgtttaattttcttattgaatcattagtgttctttacatgagtccttttcagttatatatgatgcagatatcttcttccagttggggtgtatgtttcatgctctttgtgacatctttgattaacaaagtccttgaatttagctgtgttttcctttggggcttacgcttattgcattgtctttaaacattcttctttaccttgaaatcataaactattttcctatattttcttttaattgaattgttcttttcctttttttgagacaaagtctcactgtgtcacccaggctggagtgcagtgatgcgatcttagctcactgcaacctctgcctcccgagttcaagcaattctccttcctcagcctcctgagtagctgggattacaggtgtgcgtcaccacgcccagctgatttttgtatttttagtagagacagggttttaccatgttgaccaggctggtcttgaactcctggcctcaagtgattctaattgaatttttaatataagctgaagttagggatttgttttcatttttttcagtatcatagccaatcaattattcaagcatgctttattgattgggccatcttttctcagctaatctgtgttgcctcctcagtcatgtgtcagattcccatacatgaatatattactccctcacctttaggttagctcctgctggaagtctgatagatgtatattgaacttcttgacctaccctctgatctcataaacttaataccttacttccaaactaaccctattagataagtacattttctattatattcaataattcaagcatgttcagtccagctagtcagattgtatattttgtgtgtctgggcatgtgtgttttctgttgtatttccatcatgataatttatttcctcatgtgttttgtaattttttaaactgtgagaccatgatccttaatctttcagaaaataactggttttccatttgccagggacctagccatgcctgttcctgtgtgtaaaagtacactggagtgtaaaagtacactggagaactgtattcctgggtctaaattgtaaaagtaataaattgaacaaaaacacaattcaatgaaatatgtcttttcctcctaccttgataaatattttttcataatgacaaaatagaaacaaattcgaaaatccatggattttataggactagaagttgtccaaaaaaaatcaaagatgaggaaatttcattattgttattatgcatgcctatgtgttctcttgataggctggtgaagtttgggttcattattgtgaaaataagtaaaagggaaactaacacaggcctattgtaaactaacactagctcaggaatgtgtgtatgtgcaagagcagctatgctagtcaaagatatgtgttgcaacctcccatagagagacacgtgtcagcttcaatcccaaggcctataaactaaagttgaccacttcctgtgtacctagagtctgttaaatatttcattgatgggtactggttgtaaacttgtttatcagatgtaaaacaaggtaagataatatcaattatccttccaccaggccctaagttgcctccatctcctacccactcaaccacacatttgctttactttacgtataacctctctaaacaccgatccaaatcacaggaatgtaatggttacttcactgcccaccctctgtaccacagtatcccccattaaaaaaaatatatgttaatactgcgctttatgtaattgactttggaactcagttacagactgctgtaatcctggcttccccgatgtgcactctcaagctccaggttagtaaacctcattagattgtgatccctgtctcagtccctcatttgggttgacattaccaaaaatttattttattagtctatatttactctacaaaatttatttttcttgccttcattttaacaaaatcagtaaatatgttataatcgtggttttgcacatcatctgttctattaaaaataacaagctaaaataggaaaatgaaatgtaattaacagtgatatcagcaaaatagtggagtaggcagctacaaactttcatcctcccacggaaacataaataaaaagcagggccaggcatggtggctcatgcttgtaatcccagtactttgggaggctgagctgggaggattgctttaggccaagcgtttgagatcagcctgggcaacatagcaggaccccatctctacaaacagacaaacaaaaaccagcagaaattattaggaacaactttgctagaactctggaaaaccatcaaaggtttacaccaaccaagaagatgctgaatcaagaaaaagttaagttaaagtggtaggaaagctttgtgcattcttactggcctttgccccacacacttttcagctcagtggcagttctgaagacttcagttcgcattcccaccataggatcctgttccctggttccagagggagcagagcagaccttactcacaaattatcgtgtattgctgtgctagcctgcttaggggacacatgaaggaccaatgcaaagtgttcatttccaattaatctaacttcaagtcacacaggctggaaaagtgacagacattgcttgaaaatattgtaatgcaaacaacctgaagtcgtgtagggcaaaagttatggttgaaagaaacaatagaccacctaagccagagaggaagagtaggaagagagttgttctgggaaattacggcattaaaagcacccttaaatatggctaaatttagaaaattccatgcatgttcaaggcaagacacatgttcagaaagacctgaaaagacagacccttagctttcaccttgggctggtccctaggctcaataaaagccttgctaagtgttgatgaaggccatagcacagagccatctgaaaatactggaagagatagcttcttcttccctcatctgttttttgtttctttgtttgtttgtttattgccctgccccaatgcctttctctctgacagccagctgtcagtctggctggattgaggaatacctagaaattgggtaaagcattattttgggtgtgtctgtgagggtgtttccacaggagattaccatgtgagtctgaatggactaggtggggaagattcatcctcaatgtgggtgggcaccatccaatttgcttggggtctggagagaacaaaaccagagaaaaggtgaatgtgtcaatctatctgtgcgaactgggatacactcttcctctgctgtccctggacaacaactctaggctccccagcctttggactccaggacttacaccagtgattcctgggttctcaggtctttggcctcaaactgagagttacaccatcagcttccctggttctgagacgtttagacttggactgggccatgctacaagcatcctcgggtctccagcttgcagatgtcctgtctcaggacttctcagcttctataattacatgagccaatccccctaataaatcccctctcatatgtctgtgtctctatcaatatatcctatttattctgtctccctggagaatcctaatacactttatctttctctcttttttgcccctggcattcaaggaatactcggtcaaaacagtagctgaacacaagctaaggaagagagacatcagttgtgacacataacaagaaaaacagtctatgcaaaagtagttgcagaaagtcagtaaacaattgaactactatagcttccaataattaaaataaatcaacaaaccctgggtaaggtgaaaatatgatttccagaattatcatactgtcactttcaaatggcccattcaaagggaaaaaataaattgacagaaactattcctcaggaagctcagatattggacttatgagacaaagactttgaaacaaccattttaaatatggtcaaagagtgaaagaaaaacatggacaaagaattaaggaaatcagaaaaatgatgtttgagtaagttgtgaatatcaataaagagatagaaattacaaaaaggaaccaaaaaattctgaagctgacaagtacaataattacagtgaaaaactcactattggggttcaacagtagatttgagcaggcagaagacagattcagtgaacatgaacacaaaacaatgaaaagtatctagtctgaggagcaggaaaaaaaaatgaagtgaaaaaaaacataagacctgcaggacaccattaggcacgttaacatatgcagtaagggattcccagaagcaagagagaaaaagaggaagaaataacatttgaagaaagaatgcctgaaagcttcccaaatttgatgaaatacatgaatctacgatcaatgtgttagtccattctaacgctgctatgaagaaatacccaacactgagtaatttataaaggatggaggtttaattgtctcacagttctgcatggctgggaagacctcaggaaacttacaatcatggcggaaggggaagcaaacacatacttattcacaaggcagcaggagagagaagtgtcaagcaaaggggaaaaagtcccttataaaaccatcagatctggtgaaaacttgctcactattttaagaacagcagcataagggtaactgcccccataactcaattacctcccactgggttcctcccatgacacatggggataacaggaattacaattcaagatgagatttgggtggggacacaccaatcaacaaactccacatagaataaactgaaagagatacacattgaaatacattacaatcaaactgttgaaagacaagcacaaattctcttaaaagcaacaagagggaagcaacttatcatgtacaaaggatactcgatctcacttttgcccaggctggagtgcagtggcatgatcatgactcactgtatccttgacctcctgggctcaagcaatcctccaacctcagcctcctgagtagttgggactacaggtgcatgccaccatgcctggctaatttttaaattattattattatttctgcagagatgagtttcagtatgctgcccaggctggtcttgaactcctgagctcaagcaatcctcctgcctttgcctctcaaagtgctgggattacaggcatgggccaccatgcccacccaacaaccagtttctcattggaaaccataaaagccagaggtattaggttgctaaaagaaaaagattaactgtcaaccaagaattctatatctggcaaaacagtccttcaaaaatgaggcagaaattaagatattcccaggtaaacaaaatctgaaggagtttgttccctacaggagactctaaaatgggcctttcaaattgaagagaaagagcattcattagacagtaacacgaggccatagaaagaaacaaagatgtctggtaatgataactacacaagcaaatataggagccagtgttgctgtgcgtttggcttgtaaattcactttttcttacataatttaagagatgagtacataaaaattataagtgtatattactggacacacaatatataaggaggtaatctgtgacaagataaagggggaggagctgtataggattagatactttatatgccacttaagttaacttgcaataatttcaaactacattgttataggatgttaaatataattcccatggaaaccacaaggaagtatctttaaaaatatacataaggtcataaagagggaatcaaaaacatttattatgaaatatcagttaaacacaaaaaaggcagtagtggaggaaaagaataaaaaaggcataagatatacagaaaacaaataaaatggttgaagttctaccttatcagtaattacttaaaatgtaaatgaattaaactctccaataaacatgtggatattggcataatagatgaaaaccaagacccaatgatatgctgtctaaacaagacttgtttagatccaaagacacatataggttgaaagtgaaaggatgggaaatattatccaataaaaataatgaccaaacaagagctaaagtggctatactaatattggacttaaagttaaaaactattaaaagggccaggcctggtggctcatgcctgtaatcctagcactttgggaggccgaggcgagtggatcatgaggtcaggagttcgagaccatcttggccaacacggtgaaaccctgtttctaccaaaaatacaaaaattagctgggcgtggtggcatgtgcctgtaatcccagctactcgggaggctgaggcaggagaatcacttgaaccagggagtcagaggttgcagtgaaccgagatcacgccgttgtactccggcctggtgacagagtgagactctgtctcaagaaaaaaaaaattactattaaaaggagagacattatatactgataaaagggtcagcttatcaagaagatataacaattataaatatgtatgatctaacatgaccacttttgggtggggtttttcccagaatgcaaggttggtttaagatttaaaaaataaatgtaattcaccatattaagagaataaaggagaaaagccataggcagtgcctgtgttcattatggaggtgtaattgtactaagtaccctacagactgtcaaaactggtaatatgtgatgtctacatgatgggaagccaccatagtctggtggttaaatgtatgagctctggaatcagacaatcagggttcaaattccacccagtgtggaatgtgggccactagtacacatgtgacacaaggaaggttttatggcttaaatgctgtcttactaaatttgtaaaaataagtgaagataaactgcctgccaggaaagaatgtgttgtggtatccttgttgccacctcagaaagcctagcagccccctggagatgcttgggatagtcgcctgtcccgggtggccacagaaaaggtgcacccagctcctggaactgaagaagagctagggaagcccctggaggagctggtgttggagccttgacctacgagcctggaggagtggggaaaggtggtgagggtgaactggtgtcatctgcagcagttgtctgaaaggaacaggctgaggtaaatttgccctgtggcactgaggtgcctgcagacatggaagtgacagttatgtaggctcctggagttcagtcttggagagtcccaccttgccaccgagactgtctggtgccaaacacctgcaacccatgataggaatgccaagaagtactagagagtcctgctggggttcagcctctggacctcttgcccttcgatgtttttcctcatgcattttgctggcaatatgcccttagctggggcactttttctctgtcgcatgtcccgtgtgtcacatgcatcaagctgaacagtacctggtttgccatggaggtagcaggtagtgaggagacctctccaaatgtcatatcctccaaggacccggcagcgcacaaactgcccttcataggcaacttgcttagcaaggtttgcccccatcctgctcgcatgcctggccatgctatcatgcactcgttcaacctgacccagcgtgctcccccttctggctgggatcactccactttggctttttccctggtagttctaccaggatcctggtgtcatatacccctaaaggacagtatcccatcaggaaacctcagtgttcctctctggcgatcctaaggggactctctgaaaatgacattgctgtctgcttgtaccacaaagtggccactccagaatgacaaagatccctcctccaaggcacaaatggactctcctccctcgtcacctctaagacctgggacagccactcacacctccccccagatccttgcttaaaggagaccaagaagaagataccaggggcatgaaggaaatggatactgaaggaggaagatcctcagtgtgggagaagacgcagttagagaaaaggggcccctatagcagtgggagagtaccatcagcatctaggtccctagcaaccagcagtagcatcacatatttgggagcagtcctgaacccctgaagataagcctctattccaatcactcagaagacagctgaggttagattttacagatgtcttctatgagttcgttcacaaaagatcatgccatcaccagcccagatagtcctgcctgctagaggcttcctgcctcttcatggcagtgaaggaggtgcagcagcgctgtatggccagccacattctccttcctgctgccagagaaaggaagagcttgatgaaggccattatcaactcagctctccagccacattgaagtcaaagacagcaactcacagaggaaagctttcagatactctgtcaatgagaaattctccactcacatctgccagttgtagtctctgtaaacagaaattgtcagtgcccctgctgctgccattgctgcccccattgccactgttgtgagagtgaggagagctgcccccatctcctaccttccctgcatagttactgcagaagaccttagcttggagaaccctgaacacgaagggaacctcagggtgggagaataattctcaggtcccttcagacagcgtagcagctcagccttcctgttctccctacctgctgtggaggccacagatcctttgccattggtcaccttttccttgcagattccagaaactaccaaattagcagtcactgacttggctggcctgttaggccactcatactctctgaccctgtacctacacacacatcagatactgatcatgaaatgagatgcacagttcctgactctccttttgctcttcctgctatttctcactttggattccaacctatatttgctattccacttaataatgagaacaggggccctctgcattccagtccctcggtcatacttgcgggatcctctacttctgcctaacccacacgtcctagaactttctccctctccttaaagcttaccttctgcagaatggagtcatatacacctgtgcaggtggattctcctccccttttcttacagacccctcctcaagttgcttgcaccagtacccctgtctttaccagccaacccatcactgcttctgcagtcacttctagcatgccaggcagcctgtctgcagactggacttcccagcctgcctggactgtgttataattgatgtggatagtactcttccttccaagctttcttcttcaggtctccctcaagatccggggtgagcttcctcccattggaccaggcccatcccagtgtggagcggatatcccctgcaaaggccatcatccccaccagcccacctgcttttatggtcagcagccctacttgaacttctaagcttgcttttgattcaggaaacacttaccagctgaaatctgggggtcctgattcagggccttgccagagaaccactccccccagtgccctgtcttttctggcccacctaccactgattctgcagtcacctccactccagtatacaacccgtcttcagacttggtgtctccgcctgactttgcctctaaggaaatcaacatgggtaccatgcccatgtccccatctgttatcatcctgtctctccctgcaatgttaacagctgtttccctttgagaaacctgccagcccctgaaaacccttcacacttaacctctactgcagccctagaacccaatggcagcacaactcagttggcttttgggaactaaacactcccgtgtccactttggcatcaatgtcagcattcaggcagcccatggtggtgcctcgggtgttttacccattggtgtggacactcttactcttgccatgaaatgctaccagaaagcacaacactgaggactgttgctcatttcttgctgatgccaatccaagccaatttgtatttgtgggatctgaagcccttatggatagcaaaagctttggggtcattgggtctaccacgcagagtctaccaccacatctagatcgcttagctttggagcaaaatggctgggggacagccagtaccacagctcatgatgggggaggcttagacctgagcgccagggtcctgtcagccctgatgcactcctgctgcaattggagaagccggcactgctgagagcaaatcaaatctgccctgggaaacactttccttcccacctgtagttagagcacctggtgccagcccagccaaaacacgcctactactactggaagatttgtgatcactgagaaggagtgtttcagaagacatggctgttcccccttttgttcagatcacctgggacctgtttggccagagcacttgtgttccagtggaagggaccagcaccatacctgtgctgagatccttctcttcctgccccagtcaagccacctggggcacacctaactaaagtacacctgttgcagtctaagggaccagcactgcatctatgctcggatgcctttatgttcctacctatagccagaacacctgaatcccacctgtccagggcacgtgtgttgcaatggaaggggccaacatcatacctatttttagagagtcttctcttcctgcatatggtctaagtactggggcccacctggccagagcaaacctgctggagatacctgcaccactgagaagaaatgcatgccacgtgatatatctgttcattccttccatcagacacctagggcccacctgtgctgtttgaagggctggcatttcacctgtgattggagatgctactggcagaggacctggggtacacagtctggagcacaggtgatacactgggcggaggcagccccattcctgggctccagggtatttgtatgctcagcatcattgacagctgctggcgtggtcttgcccagggcacatctgttacagtctcccaggagaacaccatacatacacctttaggaagacacttctattcctgcactcactcacaatacctgggctctatctagacaaagtagccctctgacttggtgtagtgaacaccattgagaaaatacctggctatgggccagttttccattagtcttagactggcaggaccccttgctgcctatagatatcccgttttgtcttgcccatttgccttaacaagccccgttctttcttttccagattgctatacaaatatgatataacatagccttgttcttattcattaatcctctgtgctaagcttcagcacttttgctccatctttcagggcaaatgtacctccagcatgagcatggaagcagcagtctcgcttaggacacatttgtcacctgcccaggcttcctttggaggccaaagtttgggatcaccaactcattcattttcttctagtgaaagaaacaatatctcatcaactttaagcaaaagctatccagaagtagctgatagtggtgggggaccacagtttgccataaatggaccttgctccattaggaagaggctccacctcttctagttatgtcaaacaaacttaacctgccctctatcatcctaaagaaagctggcagcccaacccttcaggtgttttgtatatatgttaaagggtgtgggttcagatgagactggtcagaagtcaacacactggccttgaggcagtctactgtggaaagaagaaaaagatcagtaagtatatccaccacaccatacccagtttcaacttctcagtctggtagaaccaagctatgggccagttttcctgccatcttacgctggcaggaccccttgctgcctgtagctgcctcctttggtccagcccatttgcctcagtgggcccttttctttctttcctagactgataaacacacacacacatatatatatacacacacatatatgttatatgtgtatatatatatacacacacatataatgtatatgtatgtgtatatatatacatatatacatcacgtgtgtgtatatatatatatatagagagagagagagagaatgccttccttttgttcattgatcctctctgcttacatgtcttttctattttagtcaacggtggaagaagaattgacttctttctataagtggtgctgtgttgaggcagatgtaacttttcaaagttctatggctcagcaaataggaggtggcatagccacactttacaactgcacaggctgacatctgacatctctgtgttttgatgtaaaggatagcagccatgaggaagggaagctcaaaggaggaagggatgggtgaccctcccttgccttttccctctgtgctcctcttccatcactctgatttggtcgtacgccagaccacccccgatgtgtgttagggaaacaaaattaacaaatttggttgaaaataattaaatgtctcatttgtgtctttctctttcatttagacttaagaaaatcatccccacatattcacacctcgaccaaagaggatgggtatggtatagaggcccttatgtctagaagaaaaaaaggaagaaaaagctcatggctcctttgtgattattggaaattttaagactaggatgtcacatattatatagaagtgttttcatgctccatgaaaattcagaaaagatcattttttcaagaaaatacctagataaggtctatttggaaaagtaattggtctggctctagtataaaaccctaaaatagcaaattacagtccttaccattttatccaaatctagctggctgtggagtcctgctgtgtctccaatagacttaattcctgaaaatacaatctttcctaagataattcaaggttcaggagaaccagctgaagctgggggaaaaagaaaaatgtaagcatttcccttagcttagacatattattttactaaatacttattcagagttgattctacactagacattgtgcttgagcctagtgacatatagctgaaaggcatctattgcctcaaaggaatttacaatatagtaggagtgatgggtgaatatatcaaaagtaaaatcggaggggttactagtagggatatgggagcagtaggaacacaaaactaagaatatcatttcttcagaaactaacagaactagactaacagcaatgaacaaaaaaaaattgtaaatccttccctatcgataattactttaaatataaatagattaaatttctcaatcaaaagacacagagtagctggatggataaaaagaattacccaactatattctgtttacaggaaactcactttagatttaaggacatacattgtttgaaagtgaatgaatggaaaaagatattccatgcaaatagtaaccagaagtgagtcaggtggctacacttatattagacaaaatagactttaagtcaaaaactaccgtaagagacagcaaaggacattatataatgatacatgggttaattcatcaggaaaatataacaattataaatatatatgaaccaaacataagaacacctaaatatataaagcaaacattggcaggaataaagggagaaatagacactttataataataataggagacttcaattcctaactttctgtatggatagaacatgcagacagaagatcaattagtaaaatcaagacttaaacaacactgaagaccaaataggcctaacaggcatatacagaacatctcacccaatagcaacagaatacacatcattctcaagcccacataaaatattctcgggtatagatcaattataattttatctagatctgggtggctatagagtcctgccatgtctccagtagacttaattcctggaaaatacagtcttttctaagataattcacagtttaggagagccagctgaagctaaggaaaaagatcaaataacaaatttaagaagatcatatcaagtatcttttctgagctaagtggaatgaaactagaagtcaacaccagaaggaaaactggaaaattcacaaatacgtggaaattgaacactgaagaggagagtacacttccaaactcattttatgaggccagcattaccctgacaccaatgccaaagacagcacaagaagaaactattggccaatatccctgatgaacatagatgcgaaaatccttagcaaagtattagcaaattgaatttaacagcacattaaaataatcagacaccataatcaagtgggatttatccctgagatgcaaggagggatcaatatatgaaaatcaattaatgtgatttactgcattaacataatgaaggataaaaatcattttatgtggctctgaaacccaatggcagcacaactcagcttttggaaattggaatatgcaggaaaggcatttgatgaaatttgacaccctttcataaggaaaaatatctcaacaaattaggttacatggaatgtatctcaacacagtaaaggccaataggaaaaggccatagctaacatacagtcaacagtgaaaaactgaaagcttttcctctaaaattaagaacaaggcaaggattcctgctcttactacttctacttaacttactactggaagtcctggccagagcaattaaggaagtgaaataaataaaaggcatccaaattagaaagaaagatgtagtaaaattgtccatgtttgcagatgacatgatcgtacatatagagaattctaaagaatccataagaaacctgagaactcagcctgggcgtggtagctcacgcctgtaattccagcactttggaaggccgaggtgggcagacgatggggtcaggagtttgagaccatcctggccaacatggtgaaactgtctctactaaaaatacaaaaattagctgggtgtggtggcaggcgcctgtaatcccagctactcgggaggctgaggcaggagaatcgtttgaacccgggaggaggcagaggttgcagtgagccgagattgtgccattgcactccagcctgggagacagggcaagactctgtctcaaaacaaaacaggctgggcacggctcacccctgtaatcccagcactttgggaggccgaggcgggcagatcacaaggtcaaaagatcgagaccatcctggccaacatggtgaaatcctgtctctactaaaagtacaaaaaaattagctgggcatggtggtgtatgcctgtagtcccagctactcaggaggctgaggcaggagaatcgcttgaacctaggagggggaggttgcagtgagtggagatcgtgccactgcaccctagcctgggcgacagagtgaggctccatctcaaaaaaaaaaaaaaaaaaaaatactgttcaaaaaaggcagaattcaaaaaatgaaaaggtaaactataacaagaaaaaatatttgcaaaatatgtgtctaacaaaggactgctacaactcaataataaaatatcagtccattcgataaaaaattggcaaacatttagctatactgaccaagataaaaggagaaaagattcaaattaccaaaatcagaaatgaaagaggaaacattactatcaacattatagaaattaaaagaactataaaggaatactatgaacaattttatacctagaaataatataatttaggtgaaatgaacaaatccctagaatcacagaaactatgaaagctaacttgagaagaaataggataatctaataggcatacaacaagtgaggagtaattaattcataatcaaaaaaccacccacaaaaaattccaggtccaggccaggaggagtggttcacccctgtaatcccagcactgtgggaggccaagccacccagatcacttgaggtcaggagttcaagaccaacctggccagcatggtgaaacccatctctactaaaaatccaaaaacaaaaaaattagccaggtgtggtggtgcatgcctgtagtcccagctactcaggaggctgaggcaggagaattgcttgaacccaggatgtggaggctgcagtgatccaagatcactccactgcactgcactccggcctgggcaacagagcaagactccatctgaaaaaaaaaaaaaaattccaggtccagatggctctactgctgaattttgctaaacatttaacaaagaattaataccaattctttgtgaactgttcattttatggacagttaactcattttatgaagccagtattaccttgataccaaaacaagacaaagacatcataagaagagtaaagtacaggccaatatgattcttatgaatatggatgcaaaactctcagcagaatactagtaaacaaaacccagcaatatataaaaagaatgtatgctagcaatgcaaggttggtttaacatccaaaaataaactattgtaatacataatatcagtagaacaaaaaacaaatcatatggtcatttcaacacatgcagaagaaacatatgacaaaattcaacatcttttcataataataattttttaaattatttttattttttaatatagagatggggttttgccatgttgcccaggctgttctcaaactgctgaactcaagcaatctgctggccttggccttccaaaatgctaggattgcaggtgtgagccaccatgcctggccataataataattttttaaaaactcaacaaagtagtataaaaatgaacttcctcaacctgataagagcaagtacaaaaaacccacggcaaacatcataatgattaaatttggatgctttccctctaagtttacaaacaagattataggctgggcatagtggctcatgtctgtaatcctaccactttgggaggttgaggcagccagatcgcttgagcccaggagttcaagaccagcctaggtaacatggcaaaaccctgtctctacaaaaattacaaaaaaattagccaggcatggtggtgggcacctgtagtcccaactacttgggaggctgaggtgggaggatcacctgaacccaggaggtcaaggctgtggtaagctgtaatcgtgccactgcattccagcctgggtgacaaagtgagactctgtctcaaaaaaacaaacaaacaaaacaaaacaaaaaaacaagattataatgtctactctcatcacttttatttattattgtacttgagtctttagctagagaaatttgcagattagagttattttgtggggaatgtccaaaagaatccaatgaaaaatctattagaactaataaactagttcagcagtattataagatataaattaatatacaaaaatcaattgtatttctatacacttgcaatgaatcatccaaaactaaaattaagtaaacaatttcatttacagtaacatcataaagagtaaaacatttacgaataaatttaacaaaaacattttcaacatatactctgaaaactacaaaacattgtttaaagagagtcaaaaatatctacagaataggaaaaagaatgcacattcacgaataagaaggcttgatattgtttaagatgacaatattccccaaactgatctacagattcaaagcagtctctagcagaatcccagctgaccactttgtagaaagtgataaggtgattgtaaaattcatatggaattgcaaggaatcctaagtagccaaacattttgaaaaagaaaaacagccgggcgcagtggctcacgcctgtaattctagcactttgggaggccaaggcgggcagatcacctgaggtaaggagttcgagaccagcctgaccaacatggtgaaatcccgtctctactaaaaatacaaaaactaggccaggtatggtggctcgtgcctgtaatcccagcactttgggaggccaaggcgggcggatcacaagatcaagagatcgagaccatcctggctaacatggtgaaaccccgtctctattaaaaatataaaaattaggcaggcgtggtggcacatgcctataatcccagctactcgagagactgaggcaggagaattgcctgaaccagggagtcggaggttgcagtgagccaagatcatgccactgcactccagcctggtgacagagtgagactccatctcaaataaaaataaaaaataaaaaagaagaagaaagaaagcaagaaagaaagaaagaaggaaggaaggaaggaaggaaggaaggaaagaaggaaggaaggaaggagaaggaaagaaagaaagagaaaagaaagaaagaaagaaagaaagaaagaaagaaagaaagaaagaaagaaagaaagagaaaaaacaaagtaggagaactcacacttactgatttcaaaacttactgcaatggcaatggccaggcatggtggctcatgcctgtaatcccagcgctttgggaggccaaggtgggagcattgcttgaagctgggaggtcgaggctgcagtgagccatgctcatatcactgcactccagcctggatgacacagcaagaccctgtctcaaaaacaacaaaaacaaaacaaaagaaaacaagagttattgcaatgcaatagtaatcaagactgtgtggtattggcacaaggatagacatatagatcaataaaatagaattgtctacaattgcatgaaataaacccataaatcttgtttgattttttaattatttcaatcattttgttacatttctctgataaatttctgaattgcttttcggtattatcttggaaatcactgtgttgccttaaaattgctgttttgaattcctgatcatagagtttgcctattgtcatcttgctaggattggtcactggctccttactttgtccgtttggggaggtcatggttccctgtctgctgttgtttcttatggatctacatctatgtctttgcattgaaggatgtgttagttattccagctttctctgtctggtttgtttttgtttttcttagatatgtttgcttagagattctttgtagtttatctgttgagtatcttcttcactaggtcactctctcctttatggtgctaggtggcaccttaagcccaggtgtgtctttgctctagtgaacattttgagctttgcccatcctgaatgagggaggtccgaaaggggctaccctggcagggtgggaaggctgactaggggtttctgcccaggagaccctctcatttgagttctgggatattgctggtgattatctttgtgctggatatttgtttctgtttctgtggtgagagtgaagccagcttgcttctactctaccattttggacctagtacaagtacaaaacccatatatctttcgtcaactgattttttaacaaaggtgctaagaccattcaatgggggaaaagtaatctttcaacaaatagtgctggggcaactggatagtaacatgcaacagaataaagttggaccattgccttgctccatatacaaaaattaactcaaggtgaattgactacataaattaagagttaaaactataaaactcttagaagaaaacatatagaaaaagcttcatgacattgattttgggaatggtttcttagatgtggcagcaaataacaagcaaaagataaactagataaatgttttgccacatcaaaatgaataacttttgtgcttcaaaagatagcatcaagaaattgaaagtaaaacccatagaatgggaaaaaatatttgcaaatcatatacgtggtaagaggcttgtactcctaatgtataactcttacaactcaataataaaagataaaaacctatttaaaaataagcaaaggatacgaatagacatttctccaaagaagacataaaaatggtcaatttgcaaacaaaaagatggttagaaacattagtcattagagaaatgcaagtcaaaaccacaatgatgtgccatttcatacccactaggatggctagaatcaaaaagtcagataacaaaaagtgttggcaaaaacctggggaaattggaacctggaacctcaaacactgttggtgggaatgttgaacggtgtagccactttggaaaacaatctgtcagtttctcaaactatcaaaaagagttactgtattacctagtaattctacttcaaagcatgtacccaagataaatgaaagcaacccatgcccacacaaaaacttgtatatgagtgtttgcagcattattcataatggctaaaaggtagaaacaatccaaatgcccaggtgattaatgggtaaacaaaagcggtacatccatataatagaatgttatttggtcataaaaacacatattatttagccataaaaacacccatgctacaacatggatgaatcttgaaaacattatgccaagtgaaaaaagccagacacaaaagaccatatatcatacagttccatttatatgaaatgtccagaacaggggatccatagaaacagaaagcagatcagtggcttccaagggttgaaggatataggctcgtagctgaaaaatagagggttttcttgagatgataaaaggttctaaaatggactctggtaatggttgtacatatctataaatatactacaaaacactgaattatacactttgaatgagtaaattatatgaatatgtgaactatatctcaataaagtgtaaaaacaaaacaaaaattaccaatataatgaataaaaatgaggcatgaatgcagatctgaaagactattaaaagtacaaaaaggaactaaaaatatctttccaaaaagaaaactgcaggtctgaatgattttaatggttaattctatcaaacatataagaaagatgttttaccagcattaaacatactctttcagagaataaagaaagcaatttttcctaactcattctgtgtaactgacattaccctaatataaaaacctagcaagaaagggacacaatagattaataaacctcatgaacatagacataaaattcttttttttttttcttctcgttctgtcacccaggctgaagtgcagtggcacaatctcggctcactgcaacctctgcctgggaggttcaagcgattctcctgtctcagcctcccgagtagctggaactacaggcatgcaccaccacgcccggttaatttttgtatttttagtagagacagtgtttcac[131 bp omitted]aattaaattcaaccaaatagaaaagaatgacctagcatgaccaagtagggtttgtctcagatatgtaaggttggtctaacactcaaaatttaaaatgtaattcaccatattaagagaacaaacaaaaagtcatatgattatctcagctttggacaaagtaattgaaaaaaattttaattctggatatcaatcccttctcaaatatatgatttacaagtattttttccaattgcctgggttgtcttttcactctgttagatagtgtcttttgatgcacaaaactttttaacatgtatttttttgtggcctggcatatttgtttttgtagttatggcaagagttctgagattaattttaatacacctttgactccagacacaatagttcacaagcaatcattacttaatttataaaaacatcttttctatgacaacatgggtttcaagtaatagttttatttttctttccaacttttattttaggtttaggggagtacatatgcagatttgtgacatgggttgaaaaaatttaacacctctttgaaaaaatttctcagtatagaaagaattggagggaacagcctttacatgataaagcacatctataaaagccttaagttaatagcacactgagcactttccaccccccgatcaggagttggaaaaggttatctattgtctccacttgtattaaacattttactggagatcacagtaactgtaaaaggtaagaaaaataaaatcatacagattaaaaagaatatgcatagaaaacataattgtatatgtagaaaacactacccgatatacaaagaaactacaagagataagaaaggaatttactgaggtgccatataaaaaagcaattatttttgctgtatcctactacataccaatagacagatagatagacgtagatatatatgtgcatgtatatatacacatatatgtgagtatgtgcatatatatacatgcatatatatatatataaatgtctatctatatgtacacacacacatatacacaaaatgcataccatgatagtggactggaaaaagttaagtcatccacttaagatgacatttaagaaaggtaagtcatccatttcaaccaggaccctgaaagttgtccatgaaattattaccagagatattggtgtccatggggcataggcttttaagccaggatagatcctgcacccacctgatgtcatctcatgtccttgcacccaggaggagatgccacacacaactgtgtaggtagctgcaaagctcagtaagaaaagaaatgcccagttttgctgtgctgacaattgttggtctctgcaaacatagaaggtaagaaagagaaataaaaggcatgcaggtggaaagagaagtaaaactgactttattcatacatgatgcatggaaaatacatgtagaaaacccaaaggaatctgcaaaaaaaaaaaatctaccaaaaataaacaatgaatttagcaagatcccaataatataaggtgtgtgtgtatatatgtatgtgtgtatacaagtactatatatacatatatatttaatgcattttctgtgttctaccaatgaactatttgaaaataacatttgcaaatcccataacatacttagggataaattagcaaaagctgagtaagacctatacacagaaaactacaaaagagtagctgcaaactttctctgtaaagggtcagggagtaaataatataggttttataggtcacgtatgatctctgtcacatattctctggaattttctgttgtttttaaagaccttttaaagacgttaacatcattcttagctaaccggccttacaaaaacaggctatgagtggggcgtggtggctcacactcataatcccagcactttgggaggccaaagcaggtggatcatttgaggtgaggagttcgagaccagcctgaccaacatggtgaaacccgtctctgctttatacaaaaattagccgggcatggtggtgggcgcctgtaatctcagctactcagaaagctgaaacaggagaatcgcttgaacccgggggtgggtggaggttgcagtgagccaagatcgtgccactgcactccagcctgggtgacagagcgagactccctctcaaaaataaaaataaaacagactataggccacatttggcccatgggctgaaatttgctgacccttggtataaaacattgctgagaaaaaaaatgtaaaagattaaaatatatggagatatatcccgtgagatggattagaaaagttaatattgctaagttttccattttggccaaactctgaaatctgttctgtggaattattacaggagatcctggtcccttggggcacaaggattttaagccagggtgaatcttgcacccacctgatgtgccatctcctacgcttgctgaggcagctgtgtggttggctgctggggtccatttgaagagaaaggccctgtgggatatgctaacaagtggaactccctgccctacatcgtctgaggaaactggaacccagccaaagaagaccttccagtaggcagtgcctgtgatcactgtaggtgtgcatggtgctcagtaccctacaggctataaaaaatagtaatgcacgatgcacacatgataaggaggcatcacagtacaggtggttaaattcaggaactctggaatccgagagcctgggtcaaatcctgacagggccactaccacctgtgtgagccaaggaagcttctaaagttttacaaatgctgtttcaccaaatttgcaaaatgaagagaacctgcctgcctggtagagatattgtggaaagcagcatccaggaaggtctgagcacctggtccccaagtcagaaaccttcacagcccagatggggatgccctaagttcatacccttctaggcgaccacagagaagtcccgcctggctccaggactcggaaaagcgctagagagcttcctggaggaggcggcatcctcccatgctacctgcatagagaagagagaagggaaactgggtcctctgtggcggctgcctgaaaggaagcagctgggggctcttgctccctgcctgtgctggtgtcttctccccaccttagcccaggccggctgcagcggcggggctgcctgggcggagtcaggagacagcaccgcccggcccctccccaggcaccttccctgtgagccagctccctaccctgggaggatctggggagttcctgcctctggctttgggcaaggtctgcctccagagtccccagctgcaagggccggcgcacccacgcgcactggttgccaaatctcccgctttcaggccaggtgcggagcgcgcctcgacagtcctgaacattctccacttaacggctgagagccgctgggagcctaacgcctgcaaccgagtgagctcgagtccggctggggtcggaccgttggacctccccgttggccctttgttgtacttcttcgcgccctgggctcgcgcaagctttctctgccacgcgttccaacggccgctcaccggcatcgggctgaacacggtgcgcttcacctcggagttcccactccactccaaggatccaacagcgcacaagctgctcttcacgggcaactacctctgcaagcttcacccccggccccgccacgccccgcagggttccctgtctggtctggatcacctcgctctccctgcgcctctctccttggcctagctagacaagtgcttctcacgatccagcgcgtttaccgctcggtttcgtcgccgctaaggggtggtggtgtctgatccgtcaggctctgcgcttctctctcggatccatcctcaatgtccaggcaggactctcacatgaagccggtgctgtctgctgttcactctaagatgtccagccactcaggacagttacgatctgtcatccagggcccaaaccgactctcctctattgctatctgaggtaggcagtctcctctgtgaggtcggtcccatccatactgcctagatccctgcgcaggaagactgagatgaggaccctaggagacagcagccagggatagcgaaggtggaggatgagtataaatagcgaccccagcgcgatcagagaagctcccttacccccacccatcgcagtgggagtgagtcttcagatctacccccaagacaacgaaatcctacccgggccattgaagggaaacctccactccaacccccagaagacgccttagatgagaaagtgaagagatattgtatgagctcattcatcaaaggccatgccatcaccagctcaggcagtgctgctaggggattcctgcctctctggaggtccagttctctctgaagacagagaagatgcagggaggaagggtttcaaacaggaactctcaacccacgtctgccagttgtagactctgtaaacaaagttccaactcgcccgctgctgccactgccgctgctattttttgaggtcaaggtgagctgcccaaactctcctaagcttttttgtatagtcgttggagaagatgtaggcttgaagaagaaagcagagccccagtctaaccacatgttcttagaagataaagccaaggccccttcagatagcagtgcagtgcccctcagcctgccccttctttcttcctgcttgttgcagagatggcaggcaccccacccttggccattttcaccttgtagtttgctgatactaccatgttaccagccactgacttggctgtcctgtcttccaggcccccagtcccttctgcccctgtaccagtcctcaccccatatacagatcattaaatgaaatgcccatatcctaactctcctttttttttttttcctattcttgttgtttctccccttaggttcaatatcattttgggagttcccctttatgggaataaaagccatttccatttcagtccctcatctgcagatttttttggggggtggtggggcagggtcctgctctgtcacccaggttgtaacgtagtggtgcaatcatggctcactgccgcctaaaactcctgggctcaagcaatcctcccacctcggcctccagagcagctaggactacaggcatttttttcttctagagatggagtcttgctatgttgcccaggctggtctggaactcctgcttttgagtgatccttctgcatcagcctctcaaaagtgctgggattacagatgtaagccaccatacccagcccagatctctacttttttttttttttttttttttgagacggagtctcgcactgtcaccaggctggagtgcagtggtgcgaacttggctcactgcaacctccacctcccgggttcaagtgattctcctgcctcagcctccagagcagctgggactacaggcatgtgccaccatgcccagctaatttttgtatttttagtagagacgaggcttcaccatgttggccaggatggtctctatctcctgacctcgttatctgcctgcctcggcctcccaaagtgctgagattacaggtgtgagccaccacgcctggcctagatctctacttttgacctcaccacatctcctaaccccttggcctttgcttcaagtctacctcctgcagaattgagtcatctatcagtttagtaatctaatcagaatctatctagtcatctaatcagaattgagtcattgtggatttttctccctttttcttacagactcttccacctgtatgcccatcttcatagaccggcccatcactggtgcctcaagcattttcactatcacagccagtaatctgcagactcaacctcaagcctactttgtactttggtataaactgcatggataccaatcccttttcacaggttttcatctcctggtctcccataggatccaggatgagtatcctcccatttgaccagttccatcccagtatggagcagatatcccttgtaaagaacacagtctccaccagcccacctgcttttatggtcaacagccctacctgaatttccaacattgccttttgacccaagaaacacctatcacctgaaatctagggttccagacaggcatcaacaggaaaccactctcttcaatgccctgtcttttctggcccacctaccactgcttctgcagtcacctccactatagtaagcagaccctcttcagacttggcatccaagcctgccttttactctgatgaaatcaacatggataccatgcccatttccccatctgttatcttcctgtctctccctgcaatgttaacagctgtttccctttgaagaacctggcagcccccagaaatccttcctacttaacctctactgcagccctggaacccaatgacagcaccactcaggcagcttttgggaatttgactcccccatgtccacctttggcatctgctatggtttgaatgtgtcaaccaaatttcgtgtattaaaaactcaatccccaaattcatatgtaaatatgtttgaaggtgggggcctttgggaggtaatgaggattagataaagtcatcagggtggacccctatgatgggactggtaaaaggaagagacacctgagctgacaggctcttgctcttgccatgtgatgtgctccaccatgtaacgacatagcaagaaggtcttcaccagatgccagcactgtgctcttgatttgctatcagagaggatagtgccatacctctggttggagacagatgacttcaatacaaagcttatgacctcagtcagagtgcctggggttcaactgggtgtagcacatctgttgcaggtgcaaatgtgtgtttaaaagtccctgtattcctgtctcccaatcagagcagtaagggctcacctggacaaagaacagggctataatgggtggagaccacaccatacctgtgtttgtatatatgtctctttctacaatgattgagatagttctgaccggaccatatttgttgtaatcagagggtataacagcatataatattagggagccactcctattcttgccttcagtcagaatacccagagtccatccattcagagtagcacctttgacttttttttttttttttttttgagatggagtcttgctctgtttcccaggctggagtgcagtggcatgatcttggctcactgcaacctccacctcccaggttcaagcaattctccctgcctcagcttcctgagtagctggtattacaggtgaccaccatcatacctggctaatttttgtatttttagtacaaacaaggtttcaccatgttggccaggctggtcttgaactcctgacctcaggtgatccgcccacctcagcctcccaaagtgctgggattacagacgtgagccactgtgctcagccccctttcagaaccatcgagaaaatacatgtgcttggaagcatttgtgttcctagctttggttacagcaatttcctttctggtgtggacatggcaagcaacagtcttgcttttggggcactttttttgcatggtcagggctcactagagacagagatttggggtgaccaattgatttattttatttggtgaaagaatgaggatctcatcaactaaggagcaaaagcttcctctagaagcaaagagaggccactatcagtcatgaatagaccttacactttgggatggaggctcagtcccacctagagatgtcaaacaaaccaaacctgctctctgtcctgctaaacaaggtggaagcccacacattgtgaggcagatgagaccagtcagaagtcaacacagtggtatcaagcagttccactgtgaggagtagagaaaactatttaggtatcattgtcatgcatccctggctttgactgtcagcctgccagacctaacccctggcccaatgttcctgtcttgaaactagaaggatgctcagtgctacctgcagctgtctcatttcccatcacccatttgccttggtgggccctcacctttctttcctagattatatataagatgggatgacgtatcctttcctcctccctctgtgcttctcccccaaccatctgacctcaatgtaggccagatatcctggacatgtgttagatgacacttgacaattttatcctttcaaaatgcttaactggccgaggggtggtggctcaaacctgtaatcccagccctttcggaggccaaggtgggtggatcacctgaggtcaggagttcaagaccagcccgggcaacatggtaaaaccccatctctactaaaaatttaaaaattagtcaggagaggtggtgcatgcctgtagttctagctattcaggaggctgaggtaggagaatcacttgaacccaagaggtggaggttgcagtgagccaagattgcaccactgcactccagactgggtgacagaatgagactctgtctcgaaaaaactaaaaatgcttaaacatctgaagtgtctctttcactttgacctaggtcaatcatcccaaacattcatacttcaaccagagagagtggatttggtatccaggctcttgggcctgtagaaaaaaaggaactaaaagctcgtacctactctgtaattactgaaaatgttaagcctaggtgagcatatttttccatttcatctaggagaatatgtatatacacatatatatgacagatatgcacaaatatcctgtttttagaagctgttagcatgctgctttaaaaaaaaaaataaagttatttggccgggcttggtggctcacgcctgcaatcccagcagtttgggaggctgaggtggtcagatcatgaggtcaggagattgagaccatactggccaacatggtgaaaccccgtctctactaaaaatacaaaaattagcctggcatggtgacacatgcctgtagtcctagctacttgggaggctgaggcaggaaaatcccttgaacccaggaggcggaggttgcagtgagccgagatcacgtcactgcactccgcctggcgacaaaacaagacttgcatctcaaaaaaaaaaaaaaaaaaaaaaaaattcaaggaaatgcccagatgagacctatttggaaaactaactagtctggctgtactctaaacccctaaaatattaccccacaagtgctacaatttcatccagatctggctgatggtagagcagttctcatctctctagacttatgtgctgaagtaaaatatttgcatatgccaggagaaccatcagaagctagtgaaagtgacgcatacaagcatttcctcagctccttacatattagtttataaaacagttatgattctacatgagagtctttctcaggccttactcatattgagttgaaagacatctcttagccgggcacagtgactcatacctataaccctagcactttgggaggctgaggcaggaggatcacttgacgtcaggagctggagactagcctaggaaacatagtaagaccccatctctacaaaattaaaaaaattaactgggcttggtggcatgcacctgtagtcccagacactcgagaggctagagcaggaggatcacttgagaccaggaagtcaaggctgcagtgagccgtgattgcaccaatgcactccaatttgggtgacagagtcaaaccccgtctcaaataaaaaaaaaaaaagaagaagaagaagaagaagaagacatctttcagcccagcagaatctacaatgcagagtgggagataaatgaataaccagaaattgccaactggaaagaatggtgatagggataagggagcaggaaaggaaggaggacataaaactaagtctgggggagataaaacatgaattgtgccttaaagaaggaagaacagccaactaggtggagaagggctatttccaaggtcaagaaaatagcatgtgaagaggcaggggagaaagagagccagtgggacaccaggaagatagtcaggtatgcatagaaacagaaaccaaagtggaagatgtggctgcggcatttggcaaggacacattttgacaaatatatatacaatgatgggacatttgttcattatcctgagcatatagggagtcaccaaaagattgggaacaaaaaaaaagtggcacaattctatgtacacttgagaaatatactgtggctacctgagagggagattagatgggtgtcactccaggggtgaggggcctaagggactccttgccatgactaaagcaaagtgagacaatggctaaagctgtgactaaagcaaaggtgaggacctgacagtggggatggcgaggaggaaacagaagagaaagtggagtaggtgacagcaaggccagggctattctagccatctggcttggacaaatggacatgactcatttggacaaacatatagtgagttcagtttttagttgtgaagtccaggtactactcagaaggctattggttcatttatcaatttaacatacttattgagtatcaaggatgtacttgggacaatttcaagtagcatcaattgcaaaaaaggtaaattcctgccttattggtgcctctatcttaatggggggcggggggagaacatgaacaacacacataaaaaatatgtgcattattttgtagattagctagttaacgagtgctatagagaataaagcagtttgtgggaaactaaatttgggagtagggagaatcatgggtttctgtttttacacaggatgcgcaggatgggccctgctaggaaggtgaaatttaagcaaaatcaagaagcaggcagttgagggaaccacgcagatatctgagggaagaacaacccagagagtgggaatagccactgcaaaggtccacaggaaggctgcccggggtcccagggagtagatattaaagacaatggagatagcatggagtcaagcatgagagcaagaggagagcgcagaggacagggcacagtctatgaaggccttgttagaagtcataagaaaggggcctttaacttagagatgggaatgattggaggatggcctggccaacttaggttttttttttttaattttaatttttattctaagttccatgtacatgtgcaggtttgttacataggtaaacatgtgccatagtggtttgctgcacctgtcaacccatcacctaggtattaagcccagcatgcattacctatttttcctaatgctctccctccccctaccccactccccaacaagccccagtgtgtgttgttcccctccatgtatccatgtgttctcattgttcagctcccacttacaagtgagaacatgtggtgttcctgagttagtttgctggggataatggcttccagctccatccatgtccctgaaaaggacatgttctcattcctttttatagctgcatagtattccatggtatatatgtaccacattttctttatccagtctaccactgatgggcatttgggttgattccatgtctttgctaatgtgaatagtgcttcagtgaacatacacatgcgtgtatctttgtaacaggatgatttatattcctttgcatatataattgctgggtcaaatggtatttctggttctagatctttgaagaattgccacaccatcttccacaatggttgaactagtttacatgcccacaaaccgtgtaaaatattcctgtttctctgcaacccctctagcatctgttgactttttaataatagccattctgacagcattgttctgtagctgggcaggagcatggaagccaggagaacaccaagaggcgaaggctgtggtcagggcaagggacagtgatggctcagatttggcaatagtgatggaacattacctctggcctgtctctatttcctttccatctgctgctcccactaggttcatgttgctgtgcttagagttcaacagagaagccatccagtctgggcttttctttgtgtggggtttctgaaaactgactcagtctcttaaagtttattcagattttctatttcttcttgagtcagttttggtagcttgtgtgtttccaagacttgttcatttcatctaggagaaaaacatacacacacacacacacacacacacacacacacacacacacacgacatatatgtatatatatcctgggtttttttatatgaccattttttacatagaaatgtgtattcttccctttctgtgtcagtaacaaacaaaagatatactaagaatttgagtacactaaagagtttcagatatggatgaaagacaccaagaataggaagaatgaatctgctccctgggttgcacacgataatcaggtaggagcaggaaggtcacaacaaccttgaagaataatgaattagccttgacagaacaaggggttgcataacatttttaaagtagaaaaaacattaagcattttattgttaatatttttaaattttttattattattactatttaataataaagcaatgttttattattaaagaaaat[131 bp omitted]agcaagaccctgtctctacaaaaaaaatttaaaaattagccaggtgtggcggcacatacctgtggtattagctactcaggaggctgaggcaggaggatcgcttgagcccaagagatagaggctgcagtgagctgtgattgcactactgcactccagcctaggcaacacagtgagaccccgtctctaaataaataaacaatcttataagtataaaaatattaaaaggtctagctgggcatggtggcacacgcctatagtcccagctacttggaaggcagaggtgggaggatcatttgagcccaggagtttgagtgtgaactgtaatcacaccactggactccagcctgggcaacaaaagtgaaactctatctcaaaaaaaataataataatgataacaataataataaaattaaaagatttatcaattaataagttgagcatcatttaaggacatggaaatcctgcatggcctctgtggtactgtttttcaatccatcatttgatttcatttgcatcctgttttgtgagatttttcctatatgtatatcaacactcagtttgggaaaatacatttatcctacatttcagagagtatatgtcaacttgcaaacactccctctccttattcatatctactgaccaacttctaaaaataaaaataaaactgaaatcacagataatgtagacagaaaaatgaaaagacagaaggccaagacagaaagatgaagctgggtgtggtggatcactcctgtaatcccagcattttggaaggcttaggtgggctgatcacttgaggtcaggagctcaagaccagcctggccaacatggcgaaaccccatatctactgaaaatacaaaaaaaatagccacatgtggtggcgggcacctgcagtcccagctactcaggaggctaaggcaggagaatcacttgaacctgggaggctgaggttgcagtgagctgagatcgcagcactgcactgcagcctgggcaacagagcaagacgaaagaaaagagaagaaaagaaaaaagaaaagaaggaaggaagggagggaaaggaaggaaggaaagaaggaaggaagggaaggaaagaaaaagagagagagatagggagggagggaggggaaatgtgttattttgagaagaggaaatggatggagaaaaaatggaaatggcatccctgtagagaactggccactctgcagaggcatgcaggggaagcgccactccacactgtgttctgggctacttcagcacctcttggggtgattctgaggacccagatcctgtcctcaggtatggagacatatcccaccatgctctctggggaccctttgagtgtgttcttcagaacagggaaagagagcattgtgaaggtggtgctaacatgttccagaggggaaagaacaagtggctgaccttcacagaaagcagcagaacctccagcctgactagttgtgtggggaagagctgtccagagcagtctctaagaagcctagtgagcatgggtgcctgcaagggtcttcatggaacagaacaggctgactccaagtttgtatctttgcagctgaaaggtgctatgtgagctccattggttgttcccaaagactacttctaggagcacttcaaggactggccatgtgccctgccattttagcaggactcaccacaaggaatgtccttggaggtaaggagaagaatatttgccgacaccctgccatgatcagaaacttcctctaaaatattgagaaatattttcactttcataagcaaactacaaatagactacttctatgtatcatgtcatagaagcccagatgctagaaatgagacatttgcttggagtacccatacctttaggatatgctgggttagtggtcctaattccaaaagaggccactgttgactgggacacagcaggatccttttgaactagctagcagtcatggctgctccccctggggactttggaagagctgctccatgaacatgcccaggaaagtggctctgtgcagcaccaggggtggagtgtggtggccatggaagtgctcctttggaactcccttcatgagacctgttggggcgcaggcacagctgatggacagcttccaggagctgtgctttagatccaccacagtgtttattccaggcctcccttcccctaggctcctcccatctaatgaccatgtacaacaaaggtacaagggcgcaggcaacaagaatctggcctttcctgcccaatgtgataatcctctacagggtttgtgtggctccaggactccctactggcctggtcaaaaacttatcagaagtgtgctgagatgtgactcatttgctacctagtccttccttctttcactgctttcacaggtagaggaaaaactctctccaaccgtgtttttcctctgcactcacaccaccaccacaatcatcaacacagaataagccttctgtgaccaaatgtgggggctttccccacacaccaggaagtggacaccagttaggtgtcttccaattcaattccaacgctacctacctggagatagctccatatcccacagctggtgggctcagtccccaagactgccccctccatacccttagacaccaatcacaagtccagtcctccaaaacttctaaccaacagacttcaagttacagttcccacagccccctctttgggtttgattaatttgctggagcagctcacagaactcagggaagcacttatttacatttactattatactttattataaagggcattacaaaggacacagatgaagagatggtatgggggaaggagcacagagctaccatgccctccccatgcataccatcctccaggaacccccatgtgttcagctatctgaaagctcaccaaagccaatcctcttgggttcttattgaagcattccttcccccagcgtatgaggcaggaccttctcaagggagggtcttaagacccacaatcagaaaggcaggggaatgtttgaaatgcttgtttcctggtgccataaagaaatagcacttgaacgtaaatttaattttctcagcaaggccatttttatgctttctgcagaaagggtacactcgccattagttctgccatgagagtacaccaaacaaaggagacagggtcatttataacctgatgcatccaccctactgctgtgtccagtttccattggctggaatgggacctcatattctgtatttgtcctgactggctagcaacttagaactttttaaaagaggcaaaggcagatgagaacaaaggaaggaggatgtaacttgtggaatgctgagaaaggtaaaaacaccttcaaataaggaagaggaacaggctatgacctaatgcttgcttggaccagcataagcatgccagggcaaatatttaggctaaattgtgggagctaagaacataaagtacattgatttctttattatggttagcagatatttaagaatgttagcacaggtctttgaataaattttgcttctaagagaagttactatttattcctaattagacagggaagaaagtctttgaagagaaacctctactttacttttcacaggaagattacagtcatgccctggggcaggtgaaatgagggcaggagacagattctgtttcctgaggcctgcccttggggcccaacacacccaacattataacaaaagactgtaacaagagctacgagagttaagagccaggagccatggatgaaaaccaatatatataaaactgcctttgcaaaaattgtaagagaaaattctgaccaactccatcttgcctttaacctccaaactgtccttggtcattcctgggcataagtcagactaactttgggagacaatagctcttcccaaaaatgaaaccacccttgtaaaactaatgaaaggctaccaggttaggaaaatcagaggggcctgaattctactaaaatgtaggtgcagttaaacaattaccagccattattccagaggtcccaagatctccaacttccccagctcctcctatgttaattactatgttaatggtaattaacatcactattgtggaatctaagacaggccttttgagatatcttttcaggcttttgcatttctgacaatcagatggccccacccaacctgtgactcaaacagtcctgttgcccccacccagaagcagactcagtgcatgaggaccattttcgtcatccctatgattgcattccccaaccagtcggcagcacccattccctagttccctgcccaccaaagtatctttgaaaaaccccagcctccaaatttcagggagattgatgagtaataactccatgtccctcgtggcatggccagcctctcatcaaactttttctttactgcaaagccatggtctcagtggattgattttttctgtgcagtgggcaggaagaaccgatcaggtgaatatatatatatatatatatatatatatatatatatatatatatatatataaaataacacaacaggaatcccacaggtactgagttcttttttttttttttttgagacagagtttcactcttgtcatccaggctggagtgcagtggtatgatctcggctcactgcaacctctgcctcccaggttcaagcaattctcctgcctcagcctcccaagtagctgggattacaggcatgtgccaccatgcctggctaattttgtatttttagtagggatggggtttcaccatgttggccaggctggtcttgaactcctgccctcaggtgatctgccagtctcagcctcccaaaatgctgggattacaggcatgagctaccgcacccagccagggttctcaaagctctctctccacacttctagcttccctttatcctttgaaggtgctttgccccaacaattcccttgtaagtcttatcctattgttgtatcttctcttcaggggacacctgcactgacagaacatgttatatgttggtttggggcaaaatatgattgctagttgtcatgcttacacataatttgctgtcaccatatgaactggagaaaactccttccctatacctttaaaatgcttgtccacttccacttggaaactgaatggcaccaatgccaggctagtggttttagaaagtggctctccagatctaaaatgttttcatggataaaccccctgtgtccttgtattcccctactagctttttaaactcttctgatttccaccaaatagaagttgcatatggaaatatgcagttagatgggccacctgactccaattgcagccctcagtccaccatctgaaaaagctcaggagatctcagaattctcctagtctaaactgacccttttattataattattttttcttgagatagggtctcactctgtcacccaggctgttagatcaatgcttcaaaacatagcttcctctgaatctgcagtacaaaagatgttctgctatgtctatttctgatagcctcttcctatactgatactttctttactagcatatatagattgcttgctttaacaattcaaccgaatatttgataacatcaaattaatttaactctatcacaggttgggtttgcaggcaagcagacattgagatggaggttatcacacagggcaattatttggaatggctcttggcctcagtacctggggaaggtggaggaagtaaacaggattgggcagagggagtagacatgttatgcattcacaacaaaggcctcagccaatcccacaggaagctctgtatctgtaaaagaccttcaatgtggtcccaagttgggagggaaccctagcttttatgctgtcacattaactagtcaatgaatgtgggcatcctcctgccaaaagggcattgttctgaccacttcttcatggaacatcttcctgtgtctccaaattgtggggaaaagaaagagagatcagactgttactgtgtctatgtagaaagaagtagacataagagactccattttgttctgtactaagaaaaaccgttctgccttgagatgctgttaatctgtaaccctacccccaaccctgtgcttgcagagacatgtgctatgttgactcaaggtttaatggatttagggctatgcaggatgtgctttgttaaacaagtgcctgaaggcagtatgcttgttaaaagtcatcaccactctctaatctcaagtacccagggacacaatacactgcgaaaggccacagggacctctgcctaggaaagccaggtattgtccaaagtttctccccatgtgatagtctgagatatggcctcgtgggaagggaaagacctgaccatcccccagcccaacacccgtaaagggtctgtgctgaggaggattagtaaaagaggaaggcctctttgcagttaagataagaggaaggcacctgtctcctgctcgtccctgggcaatggaatgtgtcagtgtaaaacccgattgtatgttccatctactgagataggagaaaaccgccttaaggctggaggtgagacatgctggcggcaatactgctctttaatgcaccagatatgtttatgtatgtgcacatcaaagcacagcaccttttctaaccttgtttaggacacagagacatttgttcacatgttttcctgctcaccctttccccactattaccttattgtcctgccacattcccctctccaagatggtagagataatgatcaataaatactgagggaactcagagactggtgccggcacgggtcctccctatgctgagcgccggtcccctgggcccacttttctttctctatactttgtctctgtgtctctttcttttctcagtctcttgtcccacccgatgagaaacacccacacccagctttaaaatttctccttttgtactctttccctttatttctcagaccggccaacacttagggaaaatagaaaagaacctacgtgaaatatcgggctgaatttcccccgatacaaatcacttattccctcgcctcctttaaatatttgcttaagtatcatttccctatgagagcaaccctaccccctccattccctactggagtccctcctactccacaggcttctcatcactgggttctgctcctcctgtttcctttcctattgcacttttcaccttataagtcactacgtaacttataacataagtttttttttttttttttttttaattgatcattcttgcttgtttctcatagagggggatttggcagggtcacaggacaatagtggagggaaggtcagcagacaaacaagtgaacaaaggtctctggttttcctaggcagaggaccctgcggccttccgcagtgtttgtgtccctgggtacttgagattagggagtggtgatgactcttaacaagcatgctgccttcaagcatctgtttaacaaagcacatcttgcactgcccttaatccattcaaccctgagtggacacagcacatgtttcagagagcacagggttgggggtaaggtcacagatcaacaggatcccaaggcagaagaatttctcttagtacagaacaaaatgaaaagtctcccatatctacgtctttctacacagacacggcaaccatccgatttctcaatcttttccccacctttcccctctctctattccacaaaaccgccattgtcatcatggcccgttctcagtgagctgttgggtacacctcccagacggggtggtggccgggcagaggagctccttacttcccagtaggggcggccgggcagaggcgcccctcacctcccggatggggcggctggccgggcagggggctgacccccccacctccctcccggacggggcggctggccgggcgggggactgaccccccccacctccctcccggacggggtggctgccaggcggagacgctcctcacttcccagacggggtggctgccgggcggaggggctcctcacttctcagacggggcggctgccgggcggaggggctcctcacttttcagacggggcggttgccaggcagagggtctcctcacttctcagacggggcggccgggcagagacgctcctcacatcccggacggggcggcagggcagaggcgctccccacatctcagacgatgggcagccgggcagagacactcctcacttcctagatgggatggcggccgggaagaggcgctcctcacttcctagatgggatggcggccgggcagagacgctcctcactttccagactgggcagccgggcagaggggctcctcacatcccagatgatgggcggccgggcagaggggctcctcacatcccagacgatgggcggccaggcagagacgctcctcacttcccagacggggtggcggccgggcagaggctgcaatctcggcactttgggaggccaaggcaggtggctgggaggtggaggttgtagcgagccgagatcacgccactgcactccagcctgggcaccattgagcactgagtgaacgagactccgtctgcaatcccggcacctcgggaggccgaggctggcggatcactcgcggttaggagctggagaccagcccagccaacacagcgaaaccccgtctccaccaaaaaaatacgaaaaccagtcaggcatggcggcacgcacctgcaatcgcaggcactcggcaggctgaggcaggagaatcaggcagggaggttgcagtgagccgagatggcagcagtacagtccagcttcggctcggcatcagagggagaccgtggaaagagagggagagggagacgggagagggagagggagaccttctgaggactgtcaacataagttataacataacatatataacataacttgttatgttatattgtatataacataacttataacataacttatagcataagttacatatatgtaacataggttacataacttataacaccttataagtcactatgtaacttataacatttcctttattatttattgtctgcttctctcaattcaaattaaggtagataaatttctttgttcacacatctagaaatgcatctgcaacagggcgggtgctcagttagtatttgttaaaacacacaggaaccatggctttacacctgtttactctctctaaatcaaccctcaatgattcctttccctccacatttatgattgttcaatgttatcaggaagagaaataaatcataatttgaagaaacaaaaatttaatggtagccacaattatagtagaaccattacctcaactgaattcctcacatctcagaactcaggattctgtacttacctcccactgggacgtatcttttccaggcatcacagataattttcttctccagctatcttatgattctttttgtataatttcattaatcaacattaacagccttctaggaattgctcacttcacaaatgttttttggaggtaatctcagttccctatgaagactctgtctctgcacttccagatgagaggaaaatcactcccagaaagagatgagacaatggaatcccaagcctttatctcagcgttcggatgacctctcttgacaaatgcacaagataatacaactgcggccactatcctagttggaaacacaatttggtaagtggttattcttttcagataaacgtatggaacttagacgaaatatatttcaggaaatgcagtgagaaacattataagggggaaagttctgctctcctagattagaacatcactgacagtggccagagaaagtttcctgagggatcagggactgtcattttccactggatgctcagattccagctgtagggtttgtgagtatccttcctccctcttccatgagacagcctcatctgaaatctccaatttacctctgacgattaaacacctagaccctcactatagtcacacaagtcttcactcaaaacacaagggcatagcagtaagattgcgatccttagctgtcatctatggagtgatcacttttgaggggcactttttgaataaatcatttcaaaatcatttcaaaaattttctcaaaaaaaaaaccctatgatttaaaaatttctttgacattctaagtattctactaatctattttatttctacccaccatggaacccacatttccctctgcaaaatacaaatttctattgtattcacccctcacccctgaacataaatttatcctcccaaacaaatttctgcccagatgacattttgacggctatttacacatccccatctcagagagcacattgtacataatttggcccttaatgcagcctctatgaaaagtcctttaatcaggggactagatgagtccttatttgtcttgaatgtctctagttcctccaggacagaagtgatcagtgaccacagccagttcaggaatcacaggatattgcaaatttgtctccgattgacatgaattgggtggattctcactccaggtctatcaccttcttatttgttaatgaaatatttgtcttcagacattgtaatagatacccaatgagtttcagagggtttgaaaatgaacactttagacatgaatagcctatatggtgaacttacagaggcaaagcgactggtcaacaaacagctgctctaccaaaaaagcctggagttacaaagcagatgaacatttttgcagagctggaaactaattccaataaggctaaaaacttgctactgctggtagggaaaatcctaactattgacagtcaaatgcttttgatgcgaggctacttaggttgatgttgataagagaaaagttcccttgtccccctggcagggcgtgcgatgggggtgtggctcgcttcttcagtgtcccgctgctcaaacctccaggggagtatacagacgggcgggctgtggggctctgaccccatggcagtgtctaggggtgaatgtttatagctgaagccccagtgggcgtgttacaggatgctctttagctgtccgcaggcggcttatgttagtcaattcaattagatccctgcgttatcgcaaggacagagggctttcatatcccggggttcctgtcttggtgtaccagaagaatcagatcacacatgggcttggaggatgactgcagggttttgagtggaagtagctctcaacagttgggggagccagaagggaaatggttttcccctggaatcgggctgctccgcagcaccggctctccttggactgccccagccaaactccgcgtccttctggtgggtggcctgcccgcgtgccagcgtctgtcatgtcttcttccgccaacatgttcctctggatgtccagcggcttgtgtgtctgcttgctagggtctcagagtatttatagggacaggatgggggcgggaacaggatgggggcgtggcaggccagggtggtcttgggaaacgcaacatttgggcaggaaaacaaaaatgcctgccctcacctaggtcagttggcacagggccaggggtggagccctagccagggaccacaccctcctgtacccagcacctccctttcccccttccatatcatttaaagggaccccgcccttccctccccagcactccccttccccacctccttatcaatgtcatcaccctggactgactccaggaatcactgtaatgtgggcttaataagaacagagctcggctggccgcggtggctcaccctgtcatcccagcactttgggaggctgaggcgggtggatcgcttgagcccaggagttcgagactagcctgggcaagatggcaaaaccccatttctacaaaaaatatacaaaaattagccaggtgtagtggcgcgcccctgtagtctcagctactctggaggccgaggtgggagaatcacttgaacctgggaggcagaggttacagtaagccgagatagcgccactgcattccagtctgagcgacagagggagaccctgtctcaaaacaaaacaaaaacaaaacaaacaaaaagcggagctgacagtcaaggtgaatttcacgtttgcctgtattcagttttagcattacataaaccaaaagaagaatgccataaaggctacaggcagctaatacagagaggtgttactggaaaaggaaccagaaagagtaaatatctcctaaacgtatgatgggacagaaagataaatgcctattacatatagttaatatctgtttgattagccttatttacattctccttttaaaaggtcttacatttagcatcttagatagaacccacaaaatttaaatatttaatagaaacttaaaattcctgtatcagaggacagaaatatatttttctcacacgtgattagtctaattgccactattaatcctattaatattctgttaaataatagcatttctgtagcgaaaagcaaacagtacggaaagataatttcaaacacctagttttcatatttttgtgttaaagtaataacatattttggtatagattatcattttttgtttgtttttgtttttgctttttctgacctggtgtgttaatgccctgggttggccctctaagaagctggccacctacttcgggcctcaggtgtcagacgccccagcttcgaggtctatggctcccagcaactcgagcgcctgcgcctgcgcattctcagccggacgggagcgcccagaagtctccgggcgccggtgggcggccttgtggactgcgccgggcatgctcggcggtgtgacggctcaggactgcatttcccagaggctgcagctatccggccaatgtagcctgaaactacatttctcagcggccactggaacgacctcaatctctgcctcctcgccagttcattgtggtcgttgacccggcagcgagctttggagttcatcgagggagaagtcagcgcccagctccgaggttggagcagccccgccgggcaacttgaatttctgcaaacgaacacagcaccgggagctctgcagacctgtgtcggcgcggaacccggactgagacatgcgtgagcgttgggtggaccgggcgaggatcccgggccggcgagtgcgggagcggcagggcagggagggtgcgtcggccggggccggtgtgcatccgcgaagactgggtgcatggcctccatgcgaacctgagctattaatatttgttactattttggataaaatcactgtaattgatttatgtaaaggagcaaaagactcttcaactctcagtttaaaaaggaaacgatagttatgataccttttgcatgcagcgggaagaaatgggattgccaggaagcctcttcttgtttggaaaaaactgtataaagtatttacaccttttaaagatgagagcaatgtcatctgaaaattatcagtgcagggaaaaggacttcaaaggatctgttgtgcagattacttaactaatgacaaaattatgtaagaaaggagagcaagatgacagctgtaaacatttccatcaatctccatattgcacagaaataggacccagctttttcttaaggttcttcaattttgcattatcccacagcagtagctctctctctctagctgctaggggacagaggaaattgaaatgtcagagaatcttttctgttggttttttatttgtttgtttttaaagaagagttgctcttaattttttagttagaattaaaagaaagcatgccagagaaacttacgttttaagtaaaaagtggaaacaggtcgggtgccatggctcatgcctgtaatcccagcactttgggaagctgaggcgggtggattgcctgagctcaggagttcgagaccaccaacatggcaacatggtgaaaccccgtctctactaaaaatataaaaattagccaggcatggtggcgtgcgcttgtagtcacagctacttgagaggcggaggtgggagaagtgcttgaagctgggaggcggcggaggttgcagtgagtggagatggcaccaccgcaatccagcctgggcgacagagcgagatcccttctctaaaaaaaaaaaaatatatatatatatatatatatatatatatatatagatagatagatagatagatacataaattaaattaagtggaaacaagtgtttaattaaaatgaaataaaggatgtataatgtttacgtaataactccaatgcagtagtgcccccttaatcggcagtttcactttcttcactttgttaccctcagtcaaccatgatctgaaaataggtgattttggtacaataagatattttgagagagaggggccatgttcacataacttttattacagtatgctattatagtt[136 bp omitted]caacatggtgaaaccctgtctctagtaaaaatacaaaaattagccaggcgtggtggtgggcacctgtaatcccagctacttgggaggctcccaggaggtggaggttgcagtgagccaagatcacaccactgcactccagcctgggcaacagagtgagaccctgtctcaaacaaacaaacaaacagaaaaataaaaatctcttatggtgcctaatttataaattaaacttaatcataggtgtgtatgtataagaaaaaacatagtatatatggggttccgtcagacatctactgaggatcttagagtgtatctc[144 bp omitted]gaaattccgtctctactaaaaatacaaaacttagctgggcgtgactatgcgcctgtagtcctagctactcgggagggaggcagaggcaggagaatcacttgaatctgggtggcgtaggttgccgtgagccaagatggcgccactgcactcactccagcctgggtgacagggcgagactccgtctcaaaaaataaaacaaaacaaaacaaaacaaaagagccaactcatgttaagcaagtattctattaacttttggggtgggttttcttattcttcaggacaaccacatgttggagctgatactcctattactattttagtgatgagaaaactgagccatattagtaactgcctgatcattttctcctatgttctctacctcccgtgtcttgaccaacctcagatttatactgtcaccattaaagaagctctggattgggtgatatggactctttcttaggcttagaacgtgggaatggagtgaggagaatctgttcaagagaagactgtgcaacccaatttgagacctagatcaacattcccaaaatgggggcctggtgggaaagcttgtgtctgattctgccttccttaagaagtgccacacctctgcgatcaactctgtacagcttagttaactggggcttgaattccactgttctccaaattttgtttgagggtgtttgtagcacagtttggaagctgaaatgaagggacaggaaggtttattaatgtatgtcattgagaacactaaagcctccttttctcctctctggattttctagcttttgaacttctcagatagaggaaccccagtgaagactgatcagttcttacaattctcaaagcatggcccatgtaagttggtgtttcttcttgaaatatggggatttttatattacgtggctattttccttaattgacctgaagcattcttcatcagaatgtaccatctaattgcctacttgattccttctgtttggcggaatgatgtcaaagtatcgtttcctccttacgaggtcctcatttctaatcggtgttcatgaattcattgagcaagttacgaagcaggtaaatagtaagtcttagctgaaaggctgtgatagagcagtggaggattgaagtcccgtggcagaagtatttgagcttcctacatccatctgtggtttgatgagtttgatctgttggcttcatctggccacacatcagaagatttgaagttttccacagagctgataagatggaattttgtattgattggtctcaatatgatgagataacatgctctatgaggcttttaagattgagtggggatgtgattatgatgtgaaacattgatatcatggttcttcttgggatgcctgagagtgatactaaggtcaattttgttatggaatgggacctgccagacttggacaacatgcatttggttctgagtcattttcaccctaatccactaactcaagaacagccaaatggccaggtgcagtggctcacacctgtaaacccaggaccttgggagccccaggtgggaggatcacttgagcccaggagttcaagaccagcctgggcagcatggcaagaccctgtctctaccaaaaaaaattttttttaattagccaggcatgggggcacatgcctgtagtcctaactacttgggaccctcagacagaaggacacttggagcccaggagttcaagattgcagtgagctatggtcatagcactgcactacagactgggcaacacagtgagactgtgtctcaaaaaaaaatttaaaaaaacagcagccaaagtattaagtgaaggatcttgtatgacactatcagcatattgttatcagtagtagatgaacagattaccagaactggggaaaactgaggcatttgttacagtcttcgtttataagtataaaatcattacttttttttttctttttttcttttttttttttttttgagactgagtctcgctctgtcacccaggctagagtacagtggcacaattttgactcactgcaacctccacctcctggattcaagtgattctgctgcctcagcttcccaagtagctgggattacaggcacatgccacaacgcccagctaatttttgtatttttagtagagatgagtttcaccgcataggccaggctggtctcgaactcctgacctcgtgtgatccacccacctcagcctcgcaaagttactaacctttaatacagatccacaagataacttttatgtcactttggaaaaaagtatttattaatataaggaaaaacacttatgatctgacataatgaacttgaagcttgaggagttattcaacaaatttgtgtcatggctattttctaagacagattttattctacagttggagaaaggaatcatagctattttcttcttaaagggaaagtaatatagagactaattgtttttgagaatttgtttcattggatacctagcaggccatatctttgtatgtactcttttacttaacagggaaactaggattcttttatccatttcaccacaaatctggagtattatgataatcctacaatatataggacattttgtccatagcagcaggattcttccagaacatgcagataccatgctcatccacttgccacatcataagcttccagcctatgtgattgttatgttattgctcccttactacactgaaacgttttattccctctcctttcaccttgaaagcattttctttgattttaccagaaatatgtgggtttgcagtatcacggatcagtgacatttgaggatgtggccatagccttctcccagcaggagtgggagagtctggactcttcccagaggggcttgtacagagatgtgatgttggagaactacaggaacttggtgtcaatgggtaagtgtacttctctcaaataattgagaatctgctccctgttatactttctcctttgcagattttagggctagcttaagaactgaacacgatttcttcttgttgccagagaaatgatttgagctttgttaggttggaaatgatccagtggcaggattagaattctggattgtctattgcaaaacattgacaaaagaggccaggttttctattatgtttttgctctaaattgctctaaatgctctgtgaaaatctgacccaccttgcaggcagaacagctagacaaagggtcttgatttgttctatctgaagacctatacaacttatatgccggcggattggataaacaaatcatttaaaactgaagttacctcattttatttcatataaaataatctgattttgtggttaaaattcatcatctctgaactttgcatttaagagtaaatgcaaattaaatctatatcctatagatatagatgtctaagcagactttgtttttgtcttagcaaaataacaataataatgttattaacacacagcgtgcttactgtgtgctgtttcactgttctctgctctttatattaatatacatttgtattaactgatttttaaccttacaagcactctataggtgctaaccattttaggtgagaatgctaaataaagcacagtgtgtttaagtgagttacgcaagatcacacagcccataggtgacggtagcagaaacttgaacccaggcacttaggttccacaatccgcgttctcaatcacaatgtcatactttctttttttttttttttttgagacatagtctcactctgttgcccaggctggagtgcagtgtaatgatctcagctcagcgcaacctccacctcccaggttcaagtgattctcctgcctcagcctccctagtagctgggattataagcgtacaccaccacacccagctaatttttgtatttttgatagaaacagggtttcaccatgttgaccaggctggtctcgaactcctgacctcaagtaatctgcccacctggcctccaaaagtgctgggattacaagcatgagccaccgggcctggttttttatcaagacacaaagaataaatgagtatacacttatctatatttataatagttagatagatagatagatttcatttaaaataaaacctttcggctgggtgtggtggttcatgcctgtaatcccagcactttgggaggccaaggtgggcggatcacgaggtcaagatatcgagaccatcctggccaacatggtgacatccgtctctactaaaaatacaaaaattagctgggcgtggtggcacatgcctatagtcccagctactcgggaggctgaggtgggagaattgcttgaacccgggaagcggaggttgcagtgagctgagatcgcacactgcactgcagcctggcgacagagtgagactctgtctctacataaataaaaccgttctctacctgtctggaattatgaatccccttgcccttctcgtgtctgagatataaaggtcaatatcgtttgacctttcatttatggcaaatttaaccaaagctggaagtatttttgaactcatattttatttcttttctacattcttatctcataagcaggacattcccgttctaaaccacatgtgatcgccttattggaacaatggaaagagcctgaagtgacagtgaggaaagatggaagaagatggtgcacaggtgagtaagagcatggcaggtagggaggccattgttgctggaaacagcccagctgtcagggaggaagtgcatctctgcaatgtttggaggtttcccttcaaagccctagggcctgggtggaaaaaggctgagacttgggtaagaaataaatatctcaccagcctcacaaaaggaacttcatctttacttattttaatactcactcacctcttgtttccctctcattttattacggacttaagtcactttcccagtgcattattccatctgtgtattgaatttcacttctttcacctcctcttttacatttggatttattcatatattcttagacagtaatagttgaacagagacaggaaaaatgagggttcaggccttgtaattatgtaagacatgccaagcagagggaatagcagatgtggatgctttgggtgggaatgagttttgtgtgcttcaggagcagtaagtaggctcaggcagaattaatgggaggagtaagaagaaaaaagctagagtgctagcaggaatttgaatttgtttgttttgttttgtttttgagtgagacagtcttcttttgtcacctaggctggcatacagtggtgcaatcatagctcactgcagcctcgaactcctgggctcaagccattttcctgcctcagcctcctgagtagctgggactacaggcacacaccaccacacctggctaatttttttaatcttcagtagagacagtgtctcactatgtggctcaggctggtcttgaactcctgggctcaagtgatcctcctgccttggcctcccaaagtactgagattacaggtatgagccatcgtgcctggccaggaatttggattattttctaatgtaactagaaactatgacctaatttacatttttccaatttttgaattttagaaaattctaataaataggaaacagataccagaaaaaccatattaaaatgtacagcttgatgagttattatgaggcagatacctttgtaaccatcactctggtcaaaagataaaacatttttacgggggctgggggacaacaagagggcgagcattaggacaaatacataatgaacacagggcttaaaacctagatgacggattgatgggtgcagcaaacaaccgtggcacatgtatacctatgtaacagacctgcacattctacacacatatcccagaacttaaagtaaaataaaaaatttaaaaaacaggccgggcgcggtggctcacgcctgtaatcccagtactttgggaggctgaggtgggtggatcaggaggtcaggagatcgagaccatcctggctaacatggtaaaaccccgtctctactaaaaaaatacaaaaaattggccaggcgtggtggcgggcgcctgtggtcccagctactcgggaggctgaggcaggagaatggcgtgaacccaggaggcggagcttgcagtgagccaagattgtgccactgcactccagcctgggcgacagagcgagactccgtctaaaaaaaaaaaaaatttttaaaaacaatttttataaaataacgtcaggcttacaaaaaagttggaaagttgtactaagaattttcatatacccttcaacccagattctccaaatgaagagagaaaactcttctaccttcccttaaggctttcatgccctgtacctaatcacagttacctttctccctccctgattaatcacctctagccacttcaaactttgccagggatcccatattctcactcccagtcttacctgctcttctcaagtcagcctgctatgcttatggacacctggttattttgaggttctcaggtctgtcagacaccccacattgtccccctctgccttttcctgcacagatgcctagaccacacaagtcttagctgtagtattttgtctttgtctcctagaattttgccattttgagggtacctcttcatgtagttttgttgtatatgttgtctatagtttttttttttttttttttttttttacagttttgctatcctgtttgctctgtttttatgggggtatttgtttaaattcaaaaacaatgctaccacttccaccattgtggtagtccattttcacgctgctgataaaacatacccaagactgggtaatttataaagaaaaagaggtttaatggactcacagttccatgtggctgaggaggcctcacaatcatggcggaaggtaaaaggcacgtcttacatggcagcagacaagagagaatgagggccaagtgacaggggtttccccttagaaagccaacagatctcatgagacttattcactaccgtgagaacagtatgggggaaaccgcccccatgattcaattatctcccaccaagtccctcccacaacacgtgggaattatgggagctacaattcaagatgagatttgggtggggacacagccaaaccctatcaaccatcatcctagtttatgtttttagataattactccaggtatttgtagtgggtagtctgaatgggggcaagagcagtgcaagctgggggtctgagtggttttgattaggatgttaatggtggacagcggtgagaaggcagagtgttcatcatacattttaatgtaaaacccacaacatgttggtggattgtaaatggatatggaggcaaagagggaaatcaagaaggatcaacaggtttggacttgagcagccgaatggtggtacggtcacgtgagatggtaaagaaggaagggcaagttgcagggcagatctaaaggtgtctgctttccatatgttaagttggagatgactcctgctcatccaagcaaagatgccaagtgggctgtggaatatgcaagtctggagctcagggagagtttaggcttacacatgagaacttgggatgcagctgtgcttggtggctcatgcctggaatcccaacactttgggaggccaagttgggaggatcacttgagcccaggaatttgagaccagcttgggcaacatagggatatcccatctctatataaaatgtacaaattagctatgcatggtggtacatacctgcagtcccagctacttgggagactgaggcaggaggatggcttgagcccaggaagtcaaggctgcagtgagctatgatcgcaccactgcactctagcctgggcaacagagaaaacccctgtctcaaaaaataaaataaaattgggattcattggcatttggctgctatttaaagccatggcactggctgaggtcccttgagagtcagtgcaggtagtgactatttttttgtctttgtttttgtttctgtttttgtttgagacggagtttcactcttgttgcccaggctggagtgcagtggtgcgatctcagctcactgcaacctctgcctccctggttaaagtgattctcctgcctcagcctcctgagtagctgggattataggcacctgccaccatgcctgactaattttttatatttttagtagagatggggtttcatcatgttggccaggtcggtttcgaactcctgaccttgggtgatccacctgcctcggcctcccaaaatgcagggattacaggcgtgagctactgcacccggccagtagtgactactcttaacatttagaggtcttctagaggaggctgcaaaagagactgcctcttttaaggtagaattaaaaccagaaagtggtgccaccaaagacaaatgaagaaagtgtttcaagatagaagagtaggccagacacagtggcttattcctataatcccaacactttgggaagacaaggcagggggaatcacttcaagccaggagttcgagaccagcctgggcaacatagcaggaccccccatctctacaaaaagtttaaaaattagccaggcatagagtcatgcccctgtagtcctagctactcatgaggctgatgcaggaaaactgcttgaacctaggagttcgaggctgcagtgagtctgcgctccagcctgggtgacagagcaagaccccatctcttaaaaataaaaaaaaaaaatagaagaatgatcacctgaaaagtgaactaagctaagcagtgatgagaattgaccacaatatatatatattttttcaagacggagtcccactctgtcacccaggctagagtgcagtggtgcaatctcggctcactgcatcctctgcctccaaaatacaaatgattctgcctcagcctcttgagtagctgggactacaggcgcctgccaccatgcctggctaatttttgtatttttagtagaggtggggtttcatcatgttgtccaggttggtctcaaacttctgacttcaggtgatccacccacctcggcctcccaaagtgctgggattacaggtgtgagccatggcgcccagtctgaccacaatatttagccttgctaaaggaggaaattttcaggggcacctaggggtgaaagcctgactggtctggtaaaaacagaatgggaggcaaggcagtgccaagaatgagcacagcagtcctcttgaggcatttggttctgaagagattttaaaaaataataataaaaaaataaaaataaggtcacattctgaagtatcgggtggacaggagtttgggggacactgttcaaaccaatacaccttgtatcctatcagtctccttatattactttgaggattttcttttttatttttttataatacctcttaatatctagaagtattataccattcttaaaagtctggatttgggaactttttttgcattttgccaactgagttaaaaactccataataatcttcacctagattcactagttcttaataatttaccactttgctctatatctatatatataaaaattttttgccgtaccatttaagttgtgcaattgcaagactttattcctaaatactccagaaggtactaagaattaaggatatgattcttgatagtcaaacacacgaaaacccatttcacctgcagtgcccaccggaggttcatcttaggctcaactgcgcattcagactaagactgcctgtggttgtcttggctctatctgtttggaaaatgccatagcaggaaccccagcttgccagcggggcagcctcacctgttttgtcaggctgcatccttacagtagttcacgcaggatacactcgcatagccctccaaaagtaaggtgcagagagacgagacacacaccaggtgagttggcgagctgccgtgacttaaagaagatacaagcatttcacagaactcagtacccttagcaattccacgggcatggtttccagggtccccacagaagacgtgccatttaaaagagattctacatttagggaagctcagagtatggagctgccatcaggtacttagagttccactcagtccacatgcaacttacctatcagtgtcttgtctcccctcccctcccctcccctcccctcccctccctcccctccctccgctcccctccctcccctatcctcttttctttcagatggagtcttgctctgtcgcctaggctggagtgcagtggcgcaatctcagctcgctgcaacctccgcctcccaggttcaagcaattctcctgccttagcctccggagtagctgggcttacaggcatgcaccaccacactggataattttgtatttttagtagagatggggtttcaccatgttggccaggctggtcttgaactcctgacttggtgatccacccgcttcggcctcccaaagtgctaggattacaggcgtgagccaccgtgcccggcctaacttctgtatctttagtagagatggggtttcaccatgttggccaggctggtctcaaattcctgacctcaattgatctaccctccttggcttcccaaagggctgggattacaggtgtaagccaccatgcccagcctaaaagctaatttttttaaaaaaagacatgcaggtgatgtgtccagacttttttcaagctttcaaaggtgtgcaggttttcgagcaacacagtaaggatacggaaggatgccacagcgttatttcactactgcatcatctttctaggcagtgccatcattcatccactttcctatttagtctttcttttttcacatgcttgggcataattgacaaataatgatgaaataacttaggatgatgagacggaaaaatgttcccaggaaatttattcttacacatgattcttactggaaaaaataagattactgtctcgtagtagattgtagttttataaaaaggtgtagtagagccctaattgtaaaattgaatgaaatttagtatattttgaaaataagtaagttttctctttgttcttttgaaggcctttaagaaagactaaatgtcatgaaatactaattcttacaaatagttagaattgcttgaaaaagaaactcaaaaactaaaaattgaccccatgggccctgatagaatactgaaggttaagacaggttcggggaggtatgctggtctcagttttctttaacacagagataggggatttcgttgatttctgttctcagtgtcccctgtctcctttttggtcatgcttcagccttatctgaagataggccgttatcttcttgggaccatgattatccaaatgtacacaactatgtcatttcaacctccaaaagttttttttctgttcttttatttcaaatatcatttggagctgggcacggtggcacacacctgtaatcccagcaccttgggaggtcgagacaggcagatcacctgaggtgaggagttcgacaccagcctggccaacatggtgaaaccctgtctttactaaaaatacaaaaattagctgggtatggtggtgcacatctgtaatcccagctactcaggaggctgaggcaggagaatcacttgaacccaagaggcagaggttgcagtgagctgtgatcgtaccacagcactcctgcctgggcaacagagtgagactccgtctcaaaaaaaaaaaaaaaaaaaaaaaaatagaatatcatatggattatttgacaagaaaatggttgcacaatagcatttatgactctaggcatttgaactctagagtatagacaaatcctaagagaatagttacgatcagaatttatagttcagttctaggccaggatcaaagacttgtacacaaatgcaaccacatgaacagatcccatccctaatccaaagagcccacagaaccagatatggaagaattatcccaattatctaatttcctgatttcttatgtctttcctaaatcattttagagtttttaaagatttcagaggtctttagagatgtgagtacaacattcttctcataagaataatatttcttgcttgaaaggcacggtactttttctaaacaatgtattttgaaccagttgcctatccagtttcatggacatgaatttgtgtctttgtgacattgtccagatctgttatcgggattacaatgctaatatggttctccccattttgagggtcctcttgtgtagcgtgacattaaaaggcttggaggtagaaggaaacagtccaaagttctgtttcagtggtgactgaagttttgttttgttttgttttgagatggagtctcactctgttgcccaggctggagtgcaatggcgcgatcttggcttactgcagcctctgcctcccaggttcaagtgattctcctgcctcagcctcccaagtagctgggattacaagtgcccgccaccatgcccagctaatttttgtatttttagtagagacagggttttgccat[133 bp omitted]ctcctctttgaattaagttatctaaaggtctctttttctgacaagggggatgaatgggccacagtgatcctaggagataacaggaaccatcctaaaggcaggtattgagttcagtgagttaacatatctaatccagttttgcagttggtttttgtgtacaaacccagtgctttagtggccaccccagtgatctcgtcctatgggcttatcaaataatatggcaatattttaaaaggtggtaaacagttttgtctcaatatatcaaaggaggcaatgtgtatcttatcagcagatatctaatgtctggccgtgctcctcattaaaagactgtttactagattacagtgataatggtccaaccccacattattgagtatgtttctccttgtgactaaacaataatctgtgtgatcttagtttattctcaagaagtacacgtttattcagtttagcagtatatcttgtcatggttttaacaacaaatgataattctcattggaattataaaatatcattctttgtatggagatattttattacgattatttcttttgtatagaaggccggactcattggctcacacctgtaatcccagcactttgggagggtgaagtgggaggacgacttgagcctaggaattggagaccagcctgggcaatgtggcaagaccccatctctataaaaattacaaaaaaattagctggacatggtggcacacacctgtagtcccagctatccaggaggctgcggtgggagggaatcacctgagcctgggaggttgaggctgcattgagctgtggttgtgccactgcactccagccggggcaagagtgagatcctatccaaaaaaaaaaagaaaagaaaaaaagaaaaagaaaaccagtaggaaaccaaagaatgaagtgctagaaagtaaagacatggacgtccttagacaaagttagcagtttaccatattcctgataaagtgacattttattttaaacatggataggataagaaagctccagtctacaaacaaaacatgccagaagatttttaggcgatgatgccacctgcacatggaaccaaaaggtgagaaaatttgtaagaacgtcaaggtgctaaaagggggaaattaggtcagtatgggacagagggagttgtgtcttgatatgaggtctgagaggtgagcagggacaatattatctgtggaaagatacatggattttaatgtaagcgccacaagaaacccctagaaggaacaataaaatatggattataaaaatttcatctgcatcagaaacatttgttagaaaggttgacagtattgatgtccaggaacttcccctatgtctgattcagaggggcgggatgctgcttgaacatccattttttaacaggctcttcaaagattattatccacacctaaatgaaaactgtttcactaatcaccaaccttactattttacataaacacttgttaatctctgcattcctttttttttttttgaatttcataatggtgttttaatattactgagctatttatttctagttggtgttattttcagtttttctcttttcttccctagaattttttttcaaatagaaaaataagatatttttaaaattttctttcagatttgcagttggaagatgatacaatcggctgtaaagaaatgcccacctctgaaaactgtccatcttttgctctacatcagaaaataagtagacagaaaccacgtgaatgtcaggaatatggaaagaccctttgtcaagactcaaagcctgttcaacatgaaagaatacatagtagtgaaaaacccaacagatgtaaagaatgtgggaagaactttagtaatggacatcaactcaccatacatcagagattgcatgttggtgagaaaccctataaatatgaaaaatgtgggaaggcctttatcagtggctcagcctttgttaagcatgggagaattcacactggtgagaagccactcaaatgtaagcaatgtggaaagactattagtggtagctatcaacttacagtacataagagtattcatactgggaagaaaccatatgagtgcggggaatgtgggaaagcttttctagtatatggaaagcttacccggcatcagagtactcacactggtgaaaaaccctttgggtgtgaggagtgtgggaaggccttcagtaccttttcatacctggttcaacatcagcgaattcataccagtgaaaaaccttacgaatgcaaagaatgtgggaaggcctttagcactagctcaccccttgctaagcatcagagaattcatactggcgagaaaccctatgaatgtaaggagtgtgggaagtccttcactgtgtatggacagcttactcgacatcagagtattcatactggtgagaaaccttttgaatgtaaggaatgtggaaaggcctttagacttagttccttccttcatgcacatcagcgaattcatgcagagataaagccctacggatgcaaggaatgcgggagaaccttcagtcgtgcctcatatcttgttcaacatggaagacttcacactggcgagaagccctatgaatgtaaggagtgtggcaaggcctttagtactggctcataccttgttcagcatcagaggatccatactggggagaaaccctatgaatgtaaggaatgtggcaaagcctttattagtcgccatcagcttaccgtacatcaaagggttcatactggagagaaaccctatgagtgtaaggaatgtggcaaggccttcagagtgcacgtacatctcacacagcatcggaaaattcatactgatgtaaagccctatgaatgtaaggaatgtggaaagacttttagtcgagcctcgtaccttgtacaacatagcagaatccatactggtaagaagccctatgagtgtaaggagtgtggcaaggccttcagttctggctcataccttgttcagcatcaaagaattcatactggggagaaaccctatgaatgtaacaaatgtgggaaagcctttactgtttatggacaacttattggacatcagagtgttcacactggtgagaaaccttttgaatgtaaggaatgcgggaaggcctttagacttaattcattccttactgaacatcagcgggtacacactggtgagaaaccctttaaatgcaaaaaatgtgggaagacctttagatacagttcagcccttaaagtgcatctgagaaaacatatgagtgttataccctaagagtctgaggagtgtgggaagtgcttcgtgtgtggctcaaacattgttgaacatcggggaatttatgctggtaggaaactttcaaatgtgaagaatattggcaggtctattctcatcttataattcataatataactcagaaaacataagaatattcctttgtcatttataggtttgtaataccaatatttatactggtggaccattcagaaaaagtgggaaacgttattacttaatggttacagcactgacagcatgaacttttatatgatgcatttattctaatgtgattgtatgaacaagtgaataaaaaaccttggacctcctaaaccactgctgaacttcaaataattcattattttttaaaaccagttaacaatgtaatgaaagcctttagccatggcactcacgttaactatcatcattgttattccactgccttgcagccagttagatattaggcactacacttatcaccttacagcattgttttaaaatggtgataatagaa[172 bp omitted]ggtgtggtggcgggcacctgtagtcccagctactcaggaggctgagacaggagaaaggcataaacctgggaggtggagcttgcagtgagccaagatcatgccactgcacttcagcctggtgacagagctagactctgtctcaaagaaaaagagaaaaattgagacctcaattaaactgggcatctgagctgggcacagttcaaatgggaggtcgggaggctgaggtgggaggttcacttgagcccaggagctcgagatcagcctgggcaatgtaaagagactctgtctccacaaaaaaataacaagtaaaatagaataaattggctatctggcacctatcagggacatgagagttccattggatagctttaccgagaacccagaattgtgtattctgggaagggaaatgtatgcctttgttattatcagtaatatctaacactgaaggaaataaggagttatttggccttgtattgtggccatagtatatctagagacatgtgtgatttacgtttatattttaggtatctgtaaggtaggagattgctagagtttttactctgaagtgcacaactcttaggcaatggcccaatagtttgcaataaatgtgaagatgaggccatttgttgaccaggtcatccagtgctaagatgactgcctgaagtttggccaattgtgttgactgctggggacatcctgtctaagatgcaaagtagcaagattccactaatttaaaaaacaacacacaaaaaatcaatatttatgatggttggcagtgtcgttcatacagtctgcaaactgctattgctgtttacttagttaatcccaagggtctccccaggtagccaaccagtctaggagagggggtgacttcttccagtaccatggcatgtggcaagagactgaggacaaaggagaccacctctcctgtagatggaatacgccagagggcccagatttggctctatcctgtattaaggaggcctcggtagccatgccaagtttgtaggttgctgtttcttgactcaaaacaaatgggcagctaagtattaggtctgtgaaagtctctatttctagaagagcctagtatgtagctagtcagtttgttttaatggaggcatagcatgattttgagaagggcagtttcttgtatcagaagcccttgggaaacttctggccatcagaggtggtctagagactcaaggacacatgagaagaggttgccaaagccttgacagtgaagggatctcttagggcgctaacaaatgtgtctgtcgatgtcaatgtggacacattttaaagactgctggggggaatcaccctgtctgatgttatgggttattatatagctaaggatacaagacactgtggtactggggagggataaacaacataggtctaaagaacagaatagataacccagaaacgtgcaaagaaatataaccaactgatttttgaaaaacaagtaaaagcaaataaatgaaggcagataaggcttttcagcaaataatgctggagcaattgaacgtccatagacaaaagatgtgaacatcaacttaatcccatactttaaacacaaattcactcaaaatggatcacagactaaaatataaaatataaaagtacaaaatgttcagaagaaaatacaggagaaaattgtcagaactgaaggctaggtttaccctaggtaaacccattaaacaaaagaaaaaatatccaaaaataagagtatcagtttccacattaaaaaactaacgaagagaaatgcaaaatgagcagaagagagtatataataaagattaaaatggaagtcaatgaaataaacagaatgaactgtgaagaaaatcagtgaaaccaaaagccttaagaacaatacaactgataaacctctagccaaggattatcaagttacaaagaagcacataaattacccagattgggaatgagagacatgacagattctacagatattgaaaggaaaatcatgaacccatttatgccaataaatctgggaaataaaataaaatgaacaaactctctttgaagacacaaaccactaaagttcacttaagaaaaataaaaatgtatatccctatatttatttttaaaatcagatttgtaattagaaaccttcctacaaagcaaactgtggcttaaatggcttcagtggtatattctaccaaacatttagggaagaaaacctaagaatgcagaaactcttccaaaaaagtggaagcataaggaatgctttccaacttaattggtgaagctattatagtgataccaaaaccacacaaaggcattacaagaaaaccgcagatcaatatccttcatgaacataggtatagaaacttcaacaaaattttggcaaatcaaacccaacaatacaaaaaaaggataacacatcaagaaaatgtagatttaccctcaaaatataaaagttcacttgatatt[140 bp omitted]gagaaaccccatctctactaaaaatacaaaattagccaggcgtggtggcggatgcctgtaatcccagctactcaggaggctgaggcaggagaatcacttgaacctgggaggcggaggttgcggtgagccaagaccgtgccgttgcactccagcctgggcaacaagactgaaactctgtctcaaaaaaaaaaaaaaaaaaaaaaaaaaaaaaaaaaaaaagactttaaaacaaggtaaaacgtgattgtagcaggtaaactctaaaaagaaccccaaatctctacttcctggaattcttacccttgggtacccctcacacattttacaagggttgatctgtaaagcccgtataaaacagaaaacatgagaacatgtaacttccaattttaggttattgaagacactggtctccttcttgggtagactctcctgctcttggatcactttctctgtttgaaagaatccctgtgacgagcatccctatggagagatccatgtggcaaggaactaaagcttcctgtcaactgccatggaaaagagattagaattgaatcttccagcctccagcaagtttcctgagactgtagctccagagacagcttaactgcaatttcatgggggattctcaaccttgacctacctaagctgcttccagattaatgtaatattctaaaatatgtaaacaaatgtagagtgacagaaagcagatcagtggtttcctaaagacgggtaggtggataaggaggaagagattacaaagagcccaagaaaacctttaatttcatggctataaacatgtaccaaaacttgtacctgtgaaatatgtgtagtttagacttcaataaagctgtttttctaaaaagaaaaaaaaatacttaaaaaaatcctcatttcctaattattttactattatctatgctttagaggttatttacgtttattgcatctattcagtggaaacagaatacaatggcgtgctattgcacatatcttcccaactccatattcagagacatcatgttgtagcttgaaattggccaagacagaagtatttacacctagggtattggtaaacactacaaaccagaacttgatctgttgttttattgaccaggtagacttaagaaagcagagaatatgttaataattcagattaaacttaaaagtgtttcatgtctctagtttcccattgtgaacagcacaaaattttgaggaaatattcttccaatattcaaaattaccctacaaaacaaataagtcactggcattattaataaatgactgcagttccaaaaaatttctttactatttcaatatcaactaatatttacttttaaaataggcaagagatatcagtagacattttaccatagaagttatatgggtggcaaataaaaacatgatttaaaatatgctcaaaatcatgaagccttagagaaatgcaagttaaaactacaataagatactattactccatccctagtagcattataaacattaaaaacacagatcatagcaattgttggtgattatgtgacgaaactggaactcttgctcacaatcagggaggcaggggatgtaaaatggtataataactttagaacacaatttggcagtttcttaaaatgtaaaatattcacctaccctgcaacaaaggcattgcacttttagataataacacaagagaagagaaagaatattcccacacaaagacctacacactaatgattacagtagctcaatttgtaacagacaaaaaccaacatgcagctaatagaagaaaaggtgggagttccagaggaaagagagaaacaaggaggaagagggactatttttaagaaatggccaaaactacccaaatttgatgaaagactttttttttattttaacacactatacagatgtaaaaagacataaatataaacacccaagaagctcaatgagctccaagaaggatgaattcaaagagactcacgctgaggcacattataatcaaactgtcaaaagacagagacataaagagaatactgaaagcagcaaaaaagaagtgactcattacattcaagggatactcactaagattatcagatttctcatcagaaaccttagagggcagaagacagaaggcagaaggcagtgggctgacatgttcaaagtgctaaaagaaaagaacggacaaccaagactcctaaatctggcaaaactatccaccaaaactgagggagaaatgaagacattcccaattgagggaatgcgttaccaagagaactgctgtgcaagaaatgctaaagggagtccttccagttgaaatgaaaggacactggacagtaactcagtgccatgagaagaaataaggatctctagtaaaggcaaatacctgggaaaattttaaagttcatattattgtaactttggtttgtactccactttttgttttttatgtgatttaagagacgaatgtgttaaaaaattattaatctatgtttttggacacacaatgtataaagaggtaattttgtgacattactatctacaagtgttggggatggagttgtataagatcagagtttttctgtgttattaacggtaagctggtaaaagttcaaatcagagtattacaaatctaggatgtgaaatgtaatctccatggtaaccacaaagaaaatagttatggaatatacacaaaatgaaacaagaatgaaattaaaatgtttcacatttgaaaaatcaaacacacaaaaagagagtaatataggaaataagggacaaaaaagctaaaatcacatagaaaataaatagcagaatgacagaagtaagtccctccttatcagtaattactttaaatataactggattaaatcctcagagcaaaacacagaaactggcaaaatgagttaaaaaacaaacaacaacaacaaaaaaaacaccgataatccaactatatgctgtctacaaagtttcactttagatccaaagacagaaatagattgaaagtaaaagaatggaaaaagatattccatgcaaatagtaaccaaaagaaagcagggatggacatactggtatcaaacaaaatagaccttaaatcaaaatgtggttccatgagacaaagagagacgttacatattaagaaaagattcaagacagcaaggacatataacaattataagcatttatatacctaataacagaccatcagaatatatgaaggaaaaatacacagaattaacagaagaaatagacagttctacaacaatagttagagacttcaataacccattctcaataataaataaaacaatcagaagaccaataaggaaatagagcacttgaacaatacaataagccaattagatctaacagaaaatatatagaatacacgataacaatagaatacacttgcacatgggatattctccaaaatagaccatgtcaggccataaattaagggtcaatagattttaaaagatatatatcatataaaatatcttccctgatcacaagaggttaggaaaacttgaaaattcacaaatttgcagagagcaaatgacactcttaaataatcattatatcaaagaaatcacaaaggaaattataaaatagagatgaaagaaaaggaaaacaatatacaaaaacttgtaggatacaacaaaagcagtgcctaagtaggaaatttatagctataaagattatattaaaacagaagaaagatctcaaatcaaaaatctaactttacaacttaaaaaaacttaagaaaaactttataacttaagaaacttaagaacaactggccaggcgcggtggctcatgcctgtaatcccagcactttggaaggccaaagcaggcagatcatgaggtcaggagttcgagaccagcctgaccaacttggtgaaaccctgtctctactaaagatacaaaaattagccaggtgtggtggtgcacacctgtaatcccagctactcaggaggctgaggcaggagaattgcttgaacctgggaggcagaggttgcagtgagctaagatcgtgccactgcactccagcctggcaacagagcaaggctctgtctcaaaaaaaaaacaaaacaaaaaaaaaacaaaacaaaaaacaaagaaaacactaagccaaaaatttagcaggaggaaggaaataataaagattagagcagagataactagagaatataaaagcaatagagaaaatcaacaaaatcaaaagttggttgttaggattaacaaaattgacgaaattttagttagaaatgacaaaaaaaagaagattcaaattaataaaattagaaattaaaatgaagacactatgatagagtctatataaataaaaaaaattacaagagagctatgaacaattgtatgccaacaaattggttgacctagaatggatatattctgtgagacacaaaatctaccaagactgaatcatgaaaaactaaaaggctgagtaccatggcttatgccagtgatcctagcactttgggagactgaggcaggagaatgcgtaagcctaagagtttgagactggcctgggcaacatagagagaccctgtctctataaaaataaaaatcagctggatatgatggtgcgtgcctgtagtcccagctactcaggaagctgaaatgggaggattgctgagcccagcaggttgaggctgcagtaagccatgatcatgccactgcactccagcctgggtgacaaagcgagactctttccctctctttctcactctctctcaatgatgaagaagaagagaaagaggaaggagaggaagaggaagaagaagaagaggaagaagaaaaagaaaagaaaaaagaaaaatttgaataggcctatcaacagtaaacatagagaatcaaaaacctctcaacatgaacaacacaaaagccctgacctgacagcttatctggtgaatactactatacacttaaagaactaacaccaatccttcttaaacttttccaaaaaactgaaggataaaacacttcctaactcattttatgaagcagaattgcccttatgccaaagccagccaaacataagagaactacaaaccaatatcccttatgaacactgatgccaaaatcctcaatcaaatattagcaagccaaattaagcagcatgttaaaaggattatacaccatgtccaagtgggatttattcctagaatgcaaggatggttcaatgcatgaaaaacaatcaatatactattccatattaacagaataaaggaaaaaaccaatcatctcttttgatgcagaaaaagcatttgacaaaaattcaataccatttcatgtaaaaaaaaactcaaaaaatgaaataaaaggaaactatgtcaatgtaataaaagccatatataaaaacccatagctaacatcattctcaatggtgaaaaaccaaaagctttctgatcaggaacaaggcaaagatgtcctctttctctgtttctgttcaacatggtactggaagtcctagccagagtaattatggaagaaaagaagtaaaaggcagccaaattggaaaggaagaagtgaaattatttctgatcccaggtgatattatatgtagataattctaaagttttcacacacacacacacacaaagacttaaaattaataaatgaattcagcaaactagcaggataaaaaaaatcaacacagaaaaatgacttacatttccatacactaacaatgaacaatctgaaaaggaaatcatgaaaacagttccatttacattagcatcaaaagtaatagaatgcttaggaattaaccaaggaggtgaaaacttgtacaatgaaaactacaaaacactcctgaaagaaagcaaagacataaataatggaatgaaattccatattcacagattgggtaacttaatattattaagatgtcaataccacccaaagtgatcaatagatttaatggaatcccaataatatcttgtgcagaaatataaagatccattctaaaattaatatggaatctcaagggatcctgaacagccaaaagaatattgaaaaagaacaaagttgaaggtctcacacttcctaattttaaaacttactacaaagctacagtaattaaaacagcatgaaactggtgtaaggacagacatacacaccaacagaattaaaatggagctcagaagtaaaccctcacatatatgctcaaatgatttttgacaggagtgccaagaccaaccaatggggaaaagacagtcttttgaacaaatggtgttaggaaaatgggatatccacatgcaaaacagtgaagctggacccttacctaacaccatacacaaaaatgaactccaaaaagtgactcaaaatgaatcaaagacctagatgtaagagctaaaactataaaaactcttagagacataggtggcaatggttccttatatatgacaccaaaggcaaagacaccaaaagaaaacatagacaaattgaacctcatgaaaatttaaaattttctgatcaacggacactatgaacagagtaaaacggtccacagaatgggagaaaatatctgataaaggattagtacccagaatatacagaaaagttgtaaaactcaacaacaaaacaacccaattcaaaaatggaaataagaagccgggcgcagtggctcatgcctgtaatcccagcattttgggaggcggaggcgggcagatcacgaggtcaggagatcgagaccatcctggctaacatggtgaaaccccatctctactaaaaatacaaaaaattagctgggcgtggtggcaggtgcctgtagtcccagctactcgggaggctgaggcaggaggatggcgtgaacccgggaggcagagcttgcagtgagccgatcgcgccactgcactccagcctgggcgacagagcgagactccatctcagaaaaaaaaaaaaaaaatggagataaggaggggtgagtgaaaaaaaaatggagaaaatacttgaatagaaatttccccaaagatatacaaatggccagtaagcacatgaaatgatacttaaagtcacaaatcattagggaaagcatatcaaataagatactacttcacacccattagaatggctaccaccaaaaaaaacaaaaacaagtgctggtgaggatgtaggaaaacaaattttttttttttttttttgagagggagtctcactctgctgcccaggctggagtgcagtggcgtgatctcggctcactgcaagctccgcctcctgggttcacaccattctcctgcctcagcctcccaagtagctgggactacaggcgcctgccaccacgcccagctaattttttgtatttttagtagagatggggtttc[131 bp omitted]gtaagaatgtgaaagggtgcagttctgtggaaaacagtgtatgtcaggtcctcaaaaaactaaaaatagatttactatatcatctagtaattctacttctgagcatatacccaaaagagttgaaagtagggtcttgaatagatatttgttgtgcactcaggttcagagcagcattattcgaaataggcaaaaggtggaggcaccccaagtatccattgacacatgatagagaagcaaaatgcagcacatacaaggaaatactaatcagccctaaaaaggaaattctgacatatgctccaacattgatgaaccttgagaatattatgctaagtgtgaaataagctagctacaaaaagacaaatacttattattctacttatatgaggtacctagagtggtcaaattcatacagacaggaagtagaatggtggttttgaggggctggggaagggaaaatgggaagttattgcttgacaggtacagaatttcagttttgcaagattgaagagttctggagacgaatggtggtgatggttacataacaatacgaatctacttaataccattgaagtatacactaaaaatggttaggatagtaaatttcatgttaagtatatttcatcagatttttttaacatttttaaataaaccataaaaaactatggtgcactcacccagtatagcactactcagtagtaaaaggaatgaactatatatacacacagcatggatgattctcaagataattatgctgcatgaaagaaaccagaccaaaagagagtataaatactttatgattccaattgtgttaattctagaaaaggcaaacaaatctaaagtaaaaaatgtaaatcaacggtttcctagggaaggcaaggagggaatgtaaaggggcatgaggtagctttgcaggtgatggatacgttcattatcatgattatggtattggttccctgagtgtacataatatatgtacaaaacttaccaaatatgaataattattgcatgacaatcacatatcaacaaagcattaaaagaaactgttgcacataaaaatccaacttcctactcattttagaaaatccgatttggcaaccctatattgactctgtcatctctttcttcttgccttgggagcaaagaatggctggctacgtcatagatactacagtccctatagtataggatctgctttttctcagtccctattttcctgccagcacagcactggccttcagatgcacagcacggagatggtaatccacaaaaccaaaacctttagattatttgctctgccagtaacattagtcataggacagaggtctgaggtcctgagaatttctgcaaaccctgaatcctgcacagccacattcaagggagcattcacggatgcacatttagcagagttccatttctgctggtttgctataatctcgcctactccctattaatcacatccagtgtttctgtacaaattatggtcccagctgggcctggtatgtcttacagttaagagatacctgcctaatgctgaacttcagggcatatggctccttggcaggtgctaaacagcatctgctttacagtattggggaatatggggcaccccctgggaataagggacccaattcatgctgttcccacatgcactggaggttgtcacaactgccccctcctcgggataaaaattcacgccattcagaccacaatattatacccataaattcctacaatttttcctaggaggccttggtggcaatgcaaatgaggtcaaatctggattgacagttgtttctctgccatcctcctgtcccctccaagataatctggagaccccttcagtttggtagatcttaactctgctcttgaaccaccccacacagtgatcagaacatggaagactaaaggcggctttatcataaggccattatcatcacatgaaccagggcaatacacaggagataagttgttgtgtagagtaacatgaaggctggacaaatccttcacaggcataacatgagaccaacaatgtcccagaaaaagggaaaccttctctagaacaagctgttggcaaaaccctgctcaggtcttcacagccaaaagctggtcatgtccatggctaaaccagccatacagggcgggaatgacatcttcccaaggcttcagactactcctaattccctttagggattggaaagagagaggagaggtctgccttccctgagcacagtggagtggtggacacactctttggagagctgcagtgtgtggtgctgacatggcttctatcacaaccccagcagtgaaaaaacgctgataaactctacagtaagagaatgtaacttgtctccagaaagcttccaacacagctagcattcctagggaacctccccagggtgggtacttggatgaacaagtttcaacttgtagttgacagcgccctgataaggtctgttctcagagcttatctctggtgtgtgctgtgaacagggaaggagcacattctccatgctcctttctctgatgtgaatcttctgatgccgaatgagggtaggcctttggttgaaggctttcccacattcgctgcattcgtaaggcctgtctggtttgtgaactttcaggtgctgcctcagattggacctctgcctgaaggttttcccacattcgctgcactcataaggccgctcgccggtgtgaagtctccggtggttattgaggctggagctttggttaaagaatttcccacattcactgcactggtaaggccgttcaccagtgtgaagtctccgatggctattgaggctggagctctggctaaataacttcccacattcattgcattcataaggccgctcaccagtgtgaactcgctgatgtttcatgaggtcagagcttcggctgaaggctttcccacactcaccacacccgtgaggccgctcgccagtgtgaactatctgatgttgaatgaggctggcaatgtggctgaagaatttcccacattcgttacacttgtaaggtctttctccagtgtgaactctccaatgtttaattaggctggagttgcagttgaaagatttcccacattcactgcactcatgggcacttctgcccgtatgaaccctcttatgatgaatgaggttggaacgctggctgaagaacttcccacagtcgctgcactcatatggcttttcaccagtgtgaaccctcttatgctgaatgaggttggagcttcggctgaagaatttcccacagtcaccacacacgtgagggctttcaccggtgtgaaccctgcgatgtttaacaaggctggagtgctggctgaagaattttccacattcacagcactcatacggttttcctctattgtgaactttctggtgttgagtgaggtcagcggcgtaagtgaagaagattccacatttgctgcattcataaggcctttctctgctgtggattctctggtgctgaacaagagtggatttgttattgaaggcatccccagattcacagcacttgttatgccttagtgcaatgtgaaaatccaccacaccttcggtggcctcgtgcggctccccatcgctgggagtgacctcacactgcagaaaccctgctgtggccacaaagtccttcccaccctccctgcaggtggaaagctgatctgatgtgtggtctctgcaggtctttacaggggaagcctggccctcctccgttctgatagggttgtgtacgttctgctgcacctgtttccggggaaggtttgcactgaactcagagcctttcacatatgcctcacacacaaatggtttctgcctgggatgtgttgtctggtgttcagccaaatgcaaaatgtctttcaaacgtaggccacatatgtcacaggggcaggtcttctgggggcacagagttgcctcgggactcctgtcctgtgccactccttctacagaaacgttatgctcagaaggtaagtccttgccctctgttccatggcaaaaatctgaaagcagagaaatgctggtgaagttcgtataaactttaatagaaggaaagagccccatcacctatgcttggctgacccaagaataagcccatgggattgttggcaacacaagaaggctcaggtcagggtaaggaataatctgctccgccatactgtgcctggccaggtcacaaaatacaggaggccttatcaggaccagggacacaaggatgggggacagtattgggcagagaggcagggtctcccactcacttctctttaaaggccttttggcagggcctgggctgctggtaacctgtgagggctatgcagtgagagcatctagacccagcaaaacctgcaactgagtagctggtgttcaagcacatcaaggaaaagcacgtatctcacaacacattaagtgtaggccagtgttggaaagtgccgcagaggaagctgaaagagagaaacggaggccagaaaagtggggcacagccaaggggcccaactcagaataataatgacaagtagataatgtgtcaagcacggggaaggaaaagcagagacgtggtctggctactggcattggtatcaaatgatgatgaataggagagaagatgctggtatgatgtaaacacagtggtgaagtcacatcctcccctagctcccatcgctgcttaccagagccaggcctgccataagcccctctggccatggctgatgtcatatccacactgtcaggcacccagggctctttccccatctccaactgggaaacgatgtgggacctgaaagatataagtcctaagggaaagacagagtgggtcagtggccagcacctgcccagttgaactaccccatgatagactacaagacaggaagctccgtatgacacagggacattgggtggtcacggcaagcagtaaccacatcagtgattggaattcctggcacagtcaggcttaggaaatattagcaagaggaaaggcacagaatctaaaccacagaactgtcagatctggataatcacccaggagggaatggccgagtcagaggtagtcacacagctaaccgcaagacccctcatgcctggagcttccctgcaaggcttcaggcagcaggtgtgggggcagctcagggagaggagggaacaatgcacatagctcagccccagaagccacaacacacataccaggaaagtggggatggaagcagtgccagcggtctggctgtgggaaggaaagagctgtttcttgggcaaaggggacaggcagagaggagctcgggacaccggggtaggggtgacagccttacccagcgaggctataagtgcaaagttttccagcatcacatcgcagtacaggagtctctgagcctcatcgaggagcacccactcctcctgggagaagtaaatggtcacgtcctcaaaggtcacgcagccctgccatgatggggacagttcgttccatgatcagtctctgtccttgggactccctatccatcccctgctcactctcctccccagctccacagctccaggaggtagcaggccctggttctgtgggcgcctcatgtgaccactgtgtcagcccgcagcagcaacaggcagggtgcagagaggcaccctctaagctctgggcctgaagtccagggcccagctcgctcttctgccagcctcttcccctagtgtcaccaatgtcatgcttctcagatacaaatgtgggcttctcctttaaaccccagtccagagccctggggtgaacagctcatactccctcccacgtgcgtttcactctttggactgcaccaccctcacagctccagaccttcaccacggcctcccattgccactgctaccttctccccatcctggcccctatcctagccatctccatgggctcccacgagtcactctgcacatggcatccagagagtgcctggcaaacataagcaccatcccagcctgccccagacctttgatggcctccactgccaagggcaacacccaggtaagggggagagggagcgctccacccttgccttggagccccctagctcccctggcctggcttcaacctaagccacccacggcacacatggatgtcacatacacttggccttctttgttgcacattctgaccctgtcatcactcacactcatttaaaaaagaaaaaaaaagccaacccctctggccatcctacccccacccacctaagcccagcaactctgccaactgactcctcttgccccaagctaattccccagcctgaggacaaaccccatcaagggtcaccacagaagcctggtgagaacataggtgagtgtgtaagcaccagcccaggcctcactgcaatattacctcctctactgctaagcctcagcatccatctcattcatgtctacactctttgggatgatctggccacctgccagaccctctgatacacccacatagcccctccatcaccaccatgaccactactgttcctcacctgtctttatgatgccaaacaagccacagtccccaagcaagaaccctgctctcagttttccagccccaccttcctcttttttttaacatcattgtcaccatgacctgaagtttcacctcctaaatctcacacacagctacactcccgtccacacaccagatgtcacattttggatgtttctaactgttgaaataaacaaagaccaatgaaatgagaaaagccaaggctacttactcaaagctcactatagcaagagagactcaatgcaagccgggagtgggagagttttatagcaaaagaaaaggaaggcttcaggcgtgccctggttggaggctcctgttcgtaggtgggtgaactagaagtgggcatcctatgtgattggttagggtgcgtatctgcctttctctggttgttcttaaatcagaagcaggagcaaaaatgaggaaagctgtctgttattaatcaaaccctggccatttgggactgctcattacagaagttattgtttttacttcctggattgtcagtccagatagcaatctggcttcctgtgggtctgacagacagcaggctggcttcctgctgtatgggttgtttattgtagataagggggttggtttcctgggcaggttctggggcagagttctatttgtatacatgatctggccattgttcgaatgaatatccagtctctcattaccttaacaactccctcagaacacccgaactgtgtgttcagcggcccactcttcaactccatttgggggtctctgggacatcacaggctcaacttggccaaaacctaacttctactgcttccatggaaaattcctcctaaaaccaacttctcagttcataaagctggattcatcaaaccaaaaaccatggattcttccctcctctttctcaccctccacatcggaaaatttggtcagcttgacttaaaagacatcaagttcccaatcacttcctctacctccagtcctcactctggtccggccagccgcagcactggcctgggctattccattaggctactccttggcatccctgcttgcggctcactccatattcagttctccactgtgcatccacagggagcctgttaagacctgagtcacagcatcttcctcctctgccctaaaccttccatggctcccaacaccctcagaacagaggcccagctctgccgttctgagctgtcttcagcccacctgctctctggttccagcagacataatattaataacactgacctgggtggggttccttgaacactcccaactcagtctccacaccgtgccccaccccacccccaagcttttgcgcacgctggttcctgtgcctacaaagccctttctccctccatcccattacatttcagcaacggaagccactttatataaaccctgccctgattcaggatcctagctgggagcaactcccttccagggtcccctgactcaaaagcaaggaaatgggaaaggcgaaaagtcctagaacaaagccatcttttgcgtctcaacaccgagaacagaagcgtggggggccgacagcgaagggcctaacgtccaagcactcacctgcgcggggtcccgcagcgccgccgctgccatcggagtctgtggtcagagcagggccccacggtgcgggaaaccacggggcgggggtagggggtctcgcaggctgaggctaccacccacctggccgtgccccagacgaggtgtgaccccgggctgagggtcgcactcctagcctcagtctcccccgtgcaaaatgcgcaaggggcccggggcgcaggctccgggggcgccgagagcgcgcagctccgctgggtacccccgttgcaaggggtcacggctggtgcaaaggcgcggagggggtcccggcctcactgtccccctcgcggtccgggaaagccggcggggcagcttcacgggcgtagccccagccgccccgcccccaactcggggtccccagctcctggggactcagcctccccgccgggaaatgacctgcgaggctgcagtgcaggaagttccggcccccaccgtggcggccgggagagttgccctctcccgtactgtcattggcctggcgccagccgctggtgcacaggcagggcctggggatcgcgagtttctgcccagcctctcgtcaggctgagggtccagggcgggaaggagagcggatctcgtcgggtctccaccgccgccgcctgcagccctcgggccttccccttaaaggggccgctcccgagcctgcagccgcccgcgctaaaccccgcccaccctccgaggtccaggaggagagccccagtgctcttcctgcgcgtgtgggcatcggccagccgcttcacccctaagggacctaaattcacactggaaaatggggatagtacccaatgggcggggtctttgcgttgtaatattaaatgtcgctctgattcagggcttctcaaaccagcaacatcagcatcacctggggactggctgaaaatgcaggttctggggcaacaacttaaatctaaggactcagaaattctggggatgggattcagccttctctactttttgcggggggggcgggggggatgggtctcgttctgttgtccaggctggagtgcagtggcctgatcatagctcactgcagcctccatctcgggctcaagctatcctcctgcctcagcctaccaggtagatgggatacaggcgtgcaccatcatacacagctaattttaaaattttttgtagagactggatctccctgtgatgcctaggctggtctcaaactcctgagctcaagtgatcctctcacctcggcctcccaaagtgttgggaattgcaggagtgagccatggtgccaggcctccttctctgttttaacaagccctctggggactccaatgctggctccaactttacagcagggactctcattgaaatccagtaaataaaatgggaaaaataacactacattgttgcaggaagtcagggaccccgaacggagggacctgctgaagccgtgacagaagaacattaattgtgaagatttcatggacatttattagttccccaaattaatacttttataatttcttatgcctgtctttactgcaatctctgaacataaattgtgaagatttcatggacatgtatcgcttccccaatcaatactcttgtgatttcctatgcctgactttactttaatctcttaatcctgtcatcttcgtaagctgaggatgtatgtcatctcaggaccctgtgatgattgcgttaactgcacagattgtttgtagggcatgtgtgtttgaacaatatgaaatctgggcaccttaagaacaggataacagcgattttcagggaacaagggagataaccttaaagtctggctgcctgtgggacgggcaggacagagccatatttctcctattaccaaaaacgggtaagagaaatatcgctgaattctttccccagtaaggaatattaataattaacagccctgggaaaataatgcattcccagggcagtgcctctaaaatggctgccctgggagtgtctgccttatgcacatgtagatagggatgaaacacaccctagtctcctgcagcgcccccaggcttgctaggattaggaaattccagcctggcgaactctagtcagaccagttctctgctcttgaaccctgttaagatgtttataaatgacaatgcgtgcacagcaggacatggaagctcatgagtgattctagttttgccctgaccttgtgatctcgccctgaccttctgccttgtgatcttttgttgcccttaaagcatgtgatctctgtgacccacaccctattcgtacactccctcccctttgaaaattgccaataaaaacttgctggttttatggctcgggggcatcacggaacctgctgacatgtgatgtctcccccagacacccagctttaaaatttatctcttttgtactctttccctttatttctcagaccagccgacacttagggaaaatagaaaagaacccacattgaattatcgggggtgggttcccccgatactacatgtcatatggtgaaaccacctttgtaaaaattataactgagaaaattatgacagtgagagatctgacctaaccaactccatcttgcttctaacctccaagctgtccttgttcgttcctgagcataggcctaactaactttgggagaaactcagtttacagtttaactttgaagcaaagataacagccctttccctctaggccgggcatggtggttcacccctgtaatcccagcactttggcaggccgaggcaggcggatcacgagttcaggagatcgagaccattctggctaacatggtgaaaccctgtctctactaaaaatacaaaaaattagccaggtgtggtggcgggcacctgtagtcccagctactcaggaggctgaggcaggagaatggcatgaaccccgggaggtagagcttgcagtgagctgagatcgcctccagcccgggcaacagagcgagactccatctcaaaaacaaaaacaaacaaaaaaacccagccctttcctgaaacaaaccctcttcttgtctggggaccagactgcctttgtaggattaacaaaagccacaagattagagagtatggtttaggagtcatgcagccaggggccaggggtcacaagattttaaaccttcccaattgctactggggataacatcactattgtaaaacctaagattggtgctcgagatatttttcagacccagcactcgatggatcagctagtgccacccagattgataaactgggtcatctggtcctgtggtccccaccctggaatttactcagtgcagttagtcaactttgactccctgtgatttcatctctaacccaactaatcagcactccccactacctggccccccacccaccaaattatccctgaaaacctctgatcactgaattttcagggagatcaagttgagtaataactctgtttctcccatggcatggctggccctgtgtcagttaaagactttgtttactgcaatgccgtggtctttttgtagcaggcaaaaagaacccattgggtggttacaatggtagataacagggcccaggacagaattcctgctgggtgcataaaagctattgtcattaccaacaccatcatcacaagaatcttacaaacactgctgtggggcggcagggaagagacacctctgtgcagtcttttggatgtttgtcaaaatatacaatgactctaactcagcaagtaccgcctcagagggaatagttatgatttttacatgaaagcacaccatagtaacatttgcctacttgattttattttattattttcttatagctgcatttttttgtttttctaaatttataaaataatatataattattgtatgcaacatgatgttttgaaatatagatacattgtggaattgatagggacaggaggtagggaaattctgggcagaagaggccaggtccatcaagctgaaaatcttgataccacggcccaaagtgagaacttacatccctgttttcccactcaaatgttgccttttccaaaaccacccgtggctcaccctgccccccatcctatgcccataaaaaccccaggctcagccggcagagagaagaaaagcagctggacattggagactatggttggatgttggagagaagcaggctgacttcaaagggacagcttgacagcgtagctttggagaggatggccagggatggccaaacttcaggggacgattaccttcctgctccatccccttttcagctcctcttcctgctgagagccactttcaccggcaataaaatcccctgcatttaccatcttcaatttgtttgtgtgacctcattcctcctggatgccagacaaaaacttgggtgccatgagtgtgggtacaaaaggctgtcgcactgaccctccactgagctgttaacacttaagctatgcatggatggcaaagctaaaagggcactgtaacacttcgtcaggggcttcaggggtcacagcaccttcccctagacactgccgtggggctagtatggaatttgctcttgccagcacccaaaagccctcaccctgtctcctgcacccactcacctgtgctcccctccccatgaggggtggaacaacaagcgagtggagttcgtccctgacagcgcccatgtactctagttcccatccaagaaggggtcagggaaatatcctgcttcagaatgactaaatcaagctcattaacatatgcatcacttcacattgttttgttttgagacagggtctcattctctcacccaggctggagtacggtggcactatcgtggctcacagcagccttgacctcttgagctcaagccatcctcccacttcagcctcccgagaagttgagactacagacgtgcaccacaacacccagctagttttttgtatcttctgcagagatggagtttcaccatgttgtctaggctggtctcaaactcctgggctcaagcactcctccttgccttggtctcccaaagtgctgcgattactggtgtgagccatggcaccagccttagttatcttttttgtgttgagaagacttaaaatctactctttaagcatttgtcaagaatacaccgtaactacagtcaccaggttgtacaatagatctcttgaacttattcctcctagctacctgaaattttatatcctttgaccaacattgccccactcccaccacctggcaacctcagcctctggtaaccaacatttcactctatttctatgagacaacttttttaggttccatatatgagtgggattatgtagtatttgtcctctgtgcctgacttatttcacttaatataatgtcctccggttcaaccttgttgtcccaattgacaggattttcttctcttttatgaccaaatagtattcagttgtgtatctctaccacattgtacaaatccgtttatctgttgatgagcacttcagtcgcttgactattgtgaacattgctgcaatgaatatggcagtgcagatatctttttgacataccaatttcaattccttgtgatgtatactcagtagtgggattcctgggtcatatggtaattttatttttatttttattgatttatttctttgggacagggtcttgctctaaagcccactctggagtgcagtggcatgatcatagctcattgccattttgacttcccaggctcaagtgatcctcccgcctcagccccctgagtaggtgggaccacaggaatgtgccaccacacccagcttatttatttatttatttttgagacagggtctggctttgttaccaagctggagtgcagtggtgcagtcttggctcaccgcaatctccatctcccagattcaagcaattctactgcctcagcctcccaagtagctgggactacagatgtgcgccactatacctggctattttttgtatttttagtagagacaggtttcaccatgttgaccaggctggtctctaactcctgacctcaagtgatctgcctgcctcagcctcccaaagtgctggcattacaggagtgagccactgcacccagccactaatttatttttatctggaaaagaaaagaggttcatttggctcaaggttctacaggctgtacaggaaacatgacatcagcatcagcctctgatgaggcctcaggaagcttccactcatgatggcaggtgaaggggacctggtgtgtggagatcacatggcaggaagcaagggagaactattattactgtggggtcagcaccaacacattcatgagggatccgctcccgtgagcaaaacacctcccactaggccccacctccgacactggggatcagtttgcaacctgagatttggaggggacaaatatccaaattatatcaggtggacagtgtggctgaggctttccctgcttcagacggaattggacacaggctctgggagagaagatacaaagtgccgagaccagctcagtcagggagaccctaacccagcggcactagaggaattaaagacacacacacagaaatatagaggtgtggagtgggaaatcagggttctcactgccttcagagctgagagcctcgaacagaggtttacccacgtatttattaacagcaagccagtgataagcattgtttctatagattatagattaactaaaagtattccttatgggaaacaaagggatggccaaaacaaagggatgggtatggctagttatctgcagcaggagcatgtccttaaggcacaaatcgctcatgctattgtttgtggtttaagaatgcctttaagcggttttccgccccaggcgggccaggtgttccttgctctcattccggcaaacccacaacctttcaacatgggcgtcatggccatcatgaacatgtcacagtgctgtagagattttgtttatggccagtttgggggccagtttatggccagattttgggggtcctgttcccaacacaaaggggtgaggaatgaggtcgagtgttccaacacagttttagcaaatgcaggtacagacacccagggtgggtgtaactgaaacgcatgcttcatggagatgcactcagctgagatgcctgatgtgtgtggggagggtgggtgcaggttagcctgagcatggtggcagcgtgggattcggacacagaaatgatttgcaggagtcagaggagggtcggtgtgctagtaacctactgctgcacaacaaattatccaaaaacgcagaggcttaaaacaacatccttttattatctcttcgtttctgtgggtctggaacccaggcacggctctgctgggttccctgtttcatggtctctcccaagaatgccatcaaggtgccagccaggacaaatatctcatctcatggctcaactggaaaggggtcacttccaagttcattcacttcatacaacctgtcggactgagggcctcagttcttccccggcttttggcctgaagctgctttcaattccttccctcttgggccttgcagaacggagagcttgcttcattaaagcaagcaaaccaagaaggcagttgagtttgccataagacagaagtcacaatcttttgtaatctcatcatggaagccacctcccaccacctttgccatattctttgggttagaagcaaagtcataaagtcgggcccacactcaagggaagaaaatgacacaagggcacccaaacaggaggtggaggttgttggaggccctcttagaagtctgcctaacaccagtggggaggtcccgagagaaaaatatctcaaactaccctccccccgggtctggactctccttgagaactatttaaagagagaatcttttaagggaattaagtggcaaagaaaaaaagttataaaaatgctaatactccaaaaactttctggggagttcctaatggtttataagcactgtgcttagtttcttacgagactgccttttaaaaatagtaattaatgggctgggcgcggtggctcgcatctgtaatcccagcactttgggaggccaaggcgggcgtatcacctgaggtcaggagttgcagaccagcctggccaatatagtgaaaccccatctctactaaaaatccaaaatattagctgggcgtggtggtgggcacttgtactcccagctactcaggaggctgaggcagcagaatcacttgaactcaggaggcagagattgcagcaagccacgatcgtgccactgcactccagcctgggcaacagagtgagactccatctcaacaaaacaaaacaaaaaatagtaattaatggaaaacaggtaattcacctgtaatttatcaaaaccaaagcttcctcaccccaacccctacacagggtcaaattcagtgttttgtcctcgggaaaaacctgacagtgttctagttgtcttttgctgcaccacaatcatcccaaagtttcacagcttagagcgatgtgggggttttttggtttggggttttttgtttgtgtgttttttaagacagagtctcagtctatcacccaggctggagtgcagtggtgcaatcactgctcactgaagctttgacctcccgggttcaagcgattctcccgcctcagcctccctagtagctaagaccacaggctcataccaacacacctggttaattttttaattttttgtagagacagggtttttccatgttgtccaggctcgtctcaaactcctggtcccaagcattcatcccatcccagcctcccaaagtgctgggattgcaggcacgagccactgctccagaatcaaagcaatgtttattctgctcacgaatctacaacttggataggactcactggggctcatgtctgcttcactcagcatcagctgggccacttgaagacaggggactggaaccttctgaaagctctctcacttacaagtctggcaattgatgctggctctcagatggggctgtgaccaggatacctacaggtggcttttctgtgcatctgcttgggcttcctcacagcatggagactgggttccgaggatgagcaccctgagaaagagagagccaggcagaagttatccccttttatgacttagccttcaaagtcacctggggtcactcctgccacagtctcaggcctgctagattgaagggatgggaacataaatcccatatctccatgaaggagatcaagtcatcgaggtcattgtaaggagggcatgtggcataggatatatccgtgcattcacctttggaaaatacaatcagccacagagagcaaacaaccccaccaccatcccacccctgagctttcacgggtgtcagtgacaacaagcatcgtaggatgaaaagaagtcagcaatcatgaaaaaataaagcagcaagaagtacaatcctttccacctcgtctcccatgagagcaggaggttgggaatgaatccatctccctgaactagagaagagacgtgcaaggtcactgggccgagcctgtgggtttgggtttctcagctggcctgttacgatgaagcttgttcttgtctattgctgcacaccaaattaccataaatttagcagctttaaacaacacccgtttattatctcacagttttgtaggtcaggagtccaagcaggcttggctgggttctgctccggtcattacaaggctgaaatccaggtgtccgccagaaattctgttagccagggcttctatcatcagttcttctctgcagggcgctgctagggaggtcctgaccaccagagggcactagaaccacaatcccggtcccagggaactttgcttgtgctcccgcccctttctgtcaaaatgctgtccggccaccagcggcagcagcgtctgggaacttgtttgaaaagcagaacctcaggacttaaaaccagacctgctgaatcaaaatctgcattttgtcaactcccccacccaggcaattggtgtgcacccttgagggccaggctgtaactcagtggttctctaccttggctgcgtgttagaaccaccagaggaagtgtgtgtgtgtgtgtgtgtgtgtgtgtgtgtgtgtgtgtgtgtgtgtttgagatggagtctccctctgtcgcccaggctgtagtgcaatggcgcgatctctgttcactgcaacctccgcctcccgggttcaagcgattctccctcctcagcctccagagtagctgggattacaggctcccaccattacgcccggctaatttttgtattttagtagagacggggttacaccatgttgaccaggctggtctcgaactccttaccccaagtgatctgcccagctcggcctcccaaagtgctgggattacaggtgtgagctaccgcgcctggcccagaggaacttttaaaatccctgatgcaagggactacccccagagattttgattgcattggtctggggtgcagcctgctgcccggattgttaaaagtttccctggggattttactgtgcagttaaggttgagaagggctgcaagcctgggtcattgcacactgtaagaaccttgtgtatgaatggaactgtgctatggaacaactccacaccacctgtgtgtgtaggcataggagaaacacataaaccctgaccctcaagggtctcctggaatgcaagacctcagccctcaggggccttcagataaaggtgcggtcagggcaaacatggaacaccaaggacgtgtgatattattttccaggtgcttcaaagactcaagtcaaacaccaactgctcagatagcaaattctagttcacccaccccacccatgctcagtgatggggctcacggcagtttcctgtaagtgtttgctgggctcgcctttctaactccactgtgggccccctgagagaagtaatgagtcgggtccccactcaatggagccctgttcgcagttgcttttgtgacgtaggaagaaaccagctggtggtggaattggtgagttgtgctccaggaaagaaggtgcctggaagacagagatcagcgatgttaggaggcactctaaaaaaatatattctttcctatttatatagagcttcatggttcccaaagcactcttaggtgcactgttgcatttttgtaacacccatctgcattagattagagtttatctgtacagatgaggaaaactgagtgacagaggcgtaaatagatatgcgggaatttgcatgagtcaggcagaattagaacaagaaatcgccttcctaaatttcctaatttcctatatgctgtttccaggatgtagcaatacccagcttctgacttctctttcctcaccgttgagaccatttctgggggattttgtcttcattctttctttttgttctcctccccaaaattgtgggtttgtttagtcattctggaattctctgttaatctcccaccaaatgtccattgacgtacttgatttctcatttttgaaggaagattcaccaggtgtaaattcttaatatatgctagcaaagacaatgatttcatcacattataaacttctcgaatgcaagaaacttatttcccattttatctctagcacctttgacaaatatttgtggaatgaatgaataatgaatgaaggggatttgcaaagttaaatgtgagtgagggaggaagcagacccaggaaattaatctggagccagtctgcaggtggtgtggtgggcgtggttgtaacctctggaccaagagctgtgaacgatggtgcacaaagaaatactgtcagcaccacagagagtgggttttatcttctcaaataatggccaactttcctgcatcttcttcccttttcctgctcctcttgaggatgtattccctgctcaaatgaaatgctgaaacgtggctgggcgcagtgactcacacctgtaatcccagcacttggggaggccgaggcggatggatcacctgaggtcaggagtttgagaccagcctggccaacacggggaaaccctatctctactaaaaatacaaacattagccaggcatggtggtgcaggcctgtaatcttagctactcgggaggctgagggaggagaattgcttgaacccaggaggtggaggttgcagtgagccaagattgtgccactgcactccagccggggtgacagagtgagactccgtcgcaaaaaaaaaaaaaaaaaaagggctgaaacgttctttgaagaattcagcgagcctttggatactgactttcagtaaaggcctccccggctccgtgcctttttttctataaagtgtccttactcttctggggtcagaaacccttccccttctggggtccccaaacaatgctcctccctgagacaaatgaggtgtgggaaggatgtgagtgacatgcccttcttccaccaccagtgtttctgctgaaaccatattcactttattaaattaatcagggaagaagggacggggagaaatgaaaataaccaagcttgcagcacattcagcggtcatcatgaggtcatcctgctctctgacctgccctttctcacagtggtttggtgcctgttgttctagaatcacacagacctgttccaagatgatagttccccttaactgctc[136 bp omitted]tggtgaaaccccgtctctactgaaaatacaaaaattagccaggcatggtggcaggtgcctgtaatcccagctactcaggaggctgaggcaggagaatcgcttgaacccaggaggcagaggttgcagtgagccaagatggtgccactgcactccagcctagatgccaagagcaaaactgcctcaaacaaacaaacaaacaaacaaaagaaatgttaagttttccatttgagatattttttcaggttctgtatactgatgaaaccactgatgccatttggtctgaaggaacccacaggagctgctgactcactaaagaatgcagttttcacaccctgatttcatccccctaaccccaagcaatcaaccaccccaattctccagctcctcgtccttccatgatccccttaaaatcgccagcccagaactccttggggagatggatttgagggtttcctctcatgtcctcacttggcgccctgtgatcatgaaactctttctctgctgccaaccctgctgtctcagtggaatggtctgtcactgcacagtggatgtgtgagcctgttggtcctataacactgcttcatcagaatgctctgaggctccataccccaggcccaccctgcactggccagctccccctgcccttctccccattgctgtactcccaccctcctccactttcttccctgagagctggctcccagggtctgcagggctcatccaggttggttctgtggccaaggggcatggttccagctcagccccttctgccccttggacttgagaaccagggtctgcagtccacagtggagtaggccttgtgtatgggctctgggtccatacttaggaccttatgaggggcaggtgatggtagaggaagaggctacccctagtgggcatttgattggcaatgggaaggcttagaaaggggtcacaggctggagagcttcatggactgcatcccaccatgaaggaaatggaaacttggcttttccattctcaggttacaagggaagaaactttcatgatggtgttgataaagaatattctgactgaataagttggggccaatttggggttgggtctcagggaaatgaagaggctgtaagagcccaaatctttcccttcacgtggcccccagagtctttaaactctcctacttcttcaaggcccaagccccttccttcaactcatcttggatcacacgtgaacaaagtaacaaacatttattaagaatttgtattcacagcctggcacagtggctcacgcctgtaatcccagcacttcggggaggccgaggctggtggatcacctgaggtcaggagttcgagatcagcctggccaacatggcgaaaccccgtctgtactaaaaatccaaaaaattagccgggcatcgtggcgggcacctgtaatcccagcaacttggaaggctgaggcagagaatcgcttgaacccggggggcagatgttgcagtgagccgagatcatgccattgcactccgacctgggcaacaagagcaaaactctgtctcaaaaaaaaaaaaaaaaaaaaaaaaggatttgtattcacaaaacttcgtgccaggctggatgcagtggctcatacctgtaatgccagcattttgggaggccaaggcgggaggatcgcttgagcccaggaggtggaggctgcagtgagttatgatcaaaccactgcactccactctgggtgacagagcaagatcttatctcaaaaaaacaaaaaatcacccaattctgtgccacagggaaacttttggggactatgaatgcacacatttgctagaagccattgaagtatacactcaaaatgagtacattgtgtgtgtaaattatacctcaataagttgatttaaaaaaactgcatcagaagattggcaagaatattggtaattgtcaaagctggatgatggacacgtggcagctcattatgcttttctctctacttttgagaatgtttaaatttttcataataaaaaaataaatttattctgtgctaatacatttagttctgggaagcaaagtgtcattgggtatgtaagagtcacactttaattcttccatgtcacaagcaattcactgagcaccagccttgtgccaaacattgggctggtacactggaaatcttatgacaaggtcacagcctgcccttgtcccgatggtttgcacagtggagggaaagagaagggcgcttaacaaataattgcccaggtaaatggtgactttcataatccatataaagaagccagatgccatcagatatgatggaagaacccaccttgctctaggcaatcagaaaggctttctagaggaggtggtggttagactgggtgctgaaggatgaataggagagtgagagaaaaatacaggagcatttgttgttattgttgttgttgttttgagacagggtctcattctgcttcccagactggagtgcagtggcactcactatatagtggcactcatagctcaccataaactcgacctattgagctcaagcgatcatcccgcctcagcttccccattagctgagaccacaggtgccctccactatgtccggctaattttttttcttttcttttttgctagtgacggggt[145 bp omitted]tcaatgctatgtgattaattccaagtacttttccctggggaactcttattctaccaggagattccaaatggtggtaaacactttattatgattcaaagcgttaattactataatggaaaaaacctatctcattgggaaccaaggagagaaagaattcttggagagaattattgctgaagtatttacaatggaagttgctgctaaactgggtgttaaaacacagttgatgttcgctaggtgcaccaaaggtctgcatgaagcagaagtgctccagctgttcaaaacctcaaatgagcactttgttccaggaagaaagacaagggcctgaaactggactttggaaagcgggtggatttgtagaggaaggaagagcattgcaggaaggtggatcgcacaggttttaaggggtaccttctggtggtgtgtgagagacagagtgagtggagctgagggagcaccctgaagagcagggggatatttggctgggtgtttagctagggtagggtcaacacggaacccttcgatgccaagatgaggaggttggaaaggaccctgacaatgggacctcactcccagttgcattcccctatcactgcctcaactttaggtgtgtggaagagcagaccctggtggcctttcagtaccaagagtcatctttggtcaaaattgctgaggatcaggtctgactaggagcacctagtctggctggaggcagaggtggccaggagccgagcaccaggggagagagagctctcagcatgatgaggagagcaccatccagtttacatatttctttctggaggaatcttcaagttctcccaacttgattcaggacaggtgacccccaaactggggcttagcatgtgagggttcttggctttgctcaagaaagaattcaagggtgagcagtatgggccagtggtagggtagaagaaaagaggctcattgaagaagccgtgttacagctccatgactgctcctgcagagcaggactacccggtcccgtaggcagacagcagcagctcagagcagttctgcagtcagatttatgctcacatttaattgcacgtagattaaggggcagtttatgcagacatttctagggaaggggtagtagctttggggtcattatatcattgccatggaaaggggtggtgactctccggtgttgccatggcaatggtaaactgacatggcgcactggtgggtgtgtcttatggaaaactgcttccctcccgtccctgttttagctagttctcagtttggtcaggtgtctgagcctcacctctggagttgagcccacctcctacctcacgggtgtactgcagccagtgagtgtcattgagtccctgcatataacaaacagactccgagatctgccttcacccagtggcagttcatgaccttttggacatggtgcatagatagtgatagaatagaaaggcagtaacgtcatccactatgcattgtcttcgttctaatcacaaaataagtgtttgaaaaattaagcattatattttcaggtgcctttcaaattctagacccagcgtacatacatacatacatacatacatatatatattatgcataacacatctatgtgccgtatttactttttttttttttgagatgaagtctcactctgttgcccaggctggagtgcagtggcgccatctcggctcattgcaagctccgcctcccaggttcaagtgattctcctgcctcagccacccgagtagctaggcatgtgccaccctgcccagctaatttttgtatttttagtagagatggggtttccccatgttggccaggctggtcttgatctcctgaccagcctcccaaagtgctaggattacagcatgagccactgcgcccagcctttatttactttataactgtacttaccttatgtaatgagtatatatgaagtagtgctaaaatatacatatttaacatttaaatatcatgcagcattaaaagacatggctgggtccagtggctcccatctgtaattccagcactttgggagaccggcaggcagacggaatgaacccagggttttgagaccagcctgggcaagatggtgagactccatgcctacaaacaatacaaaaattagccaggcatggtggcatgtgcctgtagtcccagctactcaagaggctggggtgggaggatggcttgggcatggaagaccaaggctgcagtgagctgggatggcatcattgcactccagcctgggtgacagagcaagaccctgtcacaaaaaataaataaataaacaaacaaacaataaaagacatataaataaataactgtcctctaccttgcatccacatcccataatcaatcattttcgtcttttggctcttctattattgctttatgttgctgaataatttgcatattctaatatctcttttgcattttaatcagtattattgaaggatagtttatatacaataaaatgtgtctcttttttgttacttatcgttttgaaacacctgtattccacatgtgtttattaggtgtttacgatgctctaaaagtgcattacaaataagtcatcaaaccactagcttagcaaattcacacaggcatgtcagcagtggggaaaataaaacaattaattataatgtcccattaataatatcctgtaaatatcaaacacaacgcattttttttctttgtcctcattgcaaactatactgcctaggccatccgtaaacaaaaatttttgtgtgtattataagtatttccatcagtttgggattcttaaactcaaaattcttggctctaccagttgcaaacttttaaaattttaattctaatcagtcatataaatgcacaatagcaaaagtcaaagaattcaacaagatttctaaacccagcagctctcttctctactccatgccgtcccaccccatccccctctccagaattagccactctctcttttagtgcatagttctattttcatctccttttttttttttttttgagttggaatttcactctgttgcccaggctgtagtgcagcagtgccatctccgctcactgcaacctctgccgcccgggttcaagcaattctccagcctcagcctctcaagtaactgggattacaggcatgcaccgccacaccaggctaatttttgtatttttagtagagacagggtttcaccgtgttggccaggctggtctcgaactcctgacctcaagtgatccgcccatctcagcctcccaaagtgctggaattgcaggcatgagccactgtgcccggctccacgtttataaatagcaggtttatatacagtcttgaatttgaatgttatatattatcaacttactttttactagaagatgatgaattcgctcttttcactcctctcccacacacatatttccttccccccccttcaatcctcccagaattgtcatgtcatgatttttattaagttcactgattatgttatggagatcaggaaaatgttagagatgagctatgtcgtgcgctgtccttacatttctttctcatgcaaactttttgcttttctttacaactgtagttgagatttgtccttttctctgctttgaataatttaaactccaatctctgtccttctgctccaatctatactttcttcaagccagctgcatgattctcctgctgggacttcacttcaccatctagtcatgttggtcctccattttctctttcctggtttactcccttgtttagggtgaaaatatcttccaggagcttcctgagaaagactgtttgggaggaaactttttgagactttgtttgtctgaaaatgtctaaccctgtttccacttgagtgataatttgatagaagtccaggttaaacagcagtttttccccagagtgtccaatgtcctcccacctgtgatcctttgactgtgatctgtttggctttttttttttctctctctggaaacctctagaactgatgttctgaaatattattaccatattttaacaattgtggagcactctgcaggctcttcaaatttctttcagttatggggacatttctttaatactttcttcactactggagtttctgttttctcttttttggaatttctgaatttatcctctaattttcttatattgtctcttattatccacttttgtcttttattctgctttccagaagttttccttttagtttgtcattgttttttagagacaaattctcagcggctgggcacggtggctcatgcctgtaatcccagcactttgggaggccgaggcgggcggatcacaaggtcaggagatcgagaccatcctggctaacgcggtgaaaccccttctctactaaaaatacaaaaaattagccaggcgtggtggtgggcacctgtggtcccagctactcggaaggctgaggcaggagaatggcgtgaacccgggaggcggagcttgcagtgagccgagattgagccactgcactccagcctgggcgtcacagagagactccatctcaaaaaaaaaaaaaaaaaaagagacaaattctcgctctgtcactcaggctggagtgcagtggcactatcatagcccactgcagcctcaaactccggggctcaagcaatcctcctgcctcagcctcccaagtagctaggactgcaggcttgtaccacttgtaccaccatgccctgttaattttttaatagagatagggtttcactatgttgcccaggctgatctcaaactcctggtcttaagagatcctcccactttggtccccagtgtggtggtgttgggtgacgggacttttaagaggtgatttggtcattaagagagactgatgccattctctcgagactgggttaattctggaggcagtgagttctcactcttttgggactggattggttattgcaagggcaggctgttataaagtgaggttccccttaagttttgcccctttgacacacacctgcttctcttctgcttttccatcatgttatgatgcagcactagcccctcccccgaagccaaccagatgccacccactcggtattggacttttcagcctccagaaccatgagctaaataaatttctgttcactataaattacccagtctgtaatttatagtggtatattctgttataccaacaaaaaatggactaaaacaatcactgtccgtttagatttacccacacatttatcattttcattgcttgttattccatcttacagctcatattttccctctgatattgcttttctttcttctgacctaattttttaagaatttcctttagggggatatgttcatacaaaatatttcagtttttctctgaaagtgtattcagttcatcttcatccttgaatgattcttgggcctgcagttctagatggacatgtgttttctcccagcacatcaaagctattgttccattgtcttctcgttcccatttttgctattgagaaatcagtagaaagtctaattttgttttcatatatgtaatccatcctttatttccagccacttttaagattatgtcattttctttggtattctgtggtttctaggtatgctttttaaattattctttaaaaactgaatcgaggctgggcgtggtggctcactcctgtaatcctaatactttgggagaccaaggtaggtggatcacctgaggtcaggagtttgagaccagtctggccaacatggtgaaaccctgtctctattaaaaatacaaaaattagccaggtgtggtggcacatgcctgtagtcccagctactcaggaggctgagacaggagaatcgcctgaacccaggaggcggaggctgcagtgagccgagatcatgccactgcatggcattttcttcatctgatttttttttttttttgagacagagtcttgctctgtcaccctggctggagtacagtggcatgaccttggctgactgcaacctccacctccggggttcaagcccttcttgttcttcagccttctgagtagctgggattacaggcatgcaccaccacatctggctaatttttgtatttttagtagagacggtttcacatgttggccaggctagtctcgaactcctgacctcaagtgatccacccgccctggcctcccaaagtgctgggattataggtgtgagccactgtgcctggcctctgaattttttttaatgttgcttttatcctttttcttttgataactttgttcagtttctttgaataccctttcttctctatctttttaatgaaactttccaaacacagaaaagtcgaaagaactatgcagcaaatagctgtatacataccacctatgcccttaacatttcactgtacttgctctatatgacttttttatgtgtctaaagtgagttgcagacatcaggttcccacccctaaatctgccggttatgcatttctcttttagctacctttgacttggggggaactcttcctgtgccaagtaattgaagacatttgtgcacagtagggggaagcttttgtttctgcctagcaggaagcatttccagtttccaggaacgttgctaatttagaggaatatgtgtatgtgtgagttgcttaaacttcctttgccccagatggccaagaacagcatccggaaagccacttacagtgcagcagctcagccccacctcctcctggcaagcaggcagcatcctgtccagacaactgtgtgttgatccctcctccagcactgctttcctggccccagacatcaatggcagcaagtgccaggaaggttccaacggccaggctgtatctctcactctttgtgttccaaacaggtgactgctggtttgcccatcacaacgagcctcttgtgccttgtaggcttagtctaagatcagaaccatgggcactccttcttggcttcctcctcgactcacttgacttttcctgtgttggtagctcttcctcctctgacctttcagataccccctagttatgccagaagtgcagagtgcatttatgtttctgaatcctccttgctggtctggtgtaattcctgaaagaaggcatactgcagtaattttacttatgattctttttgcaactagcaagatcaaccagatatttatttattttcattttttagaaaattttaatataattttaatgttgtagggagcatggggaatatggagaagggcaggaagagacttttgtgggtgatgttggttagcttgattgtggtggtgatttcatggatatatacaaatgtcaatatcaaagataaaaattgtataatttaaatatgtgcagtgtatcatatatcaattatacttcaataagcctgttaaaatagttttaacaatgatgatatattgcaacttttatgtattttaaactaattgagtttttatacatgaaattgtacatgtaattgagtttaaaatacgtaaaattttaatgacaagttaaattttataacatacattcagtaaagtgcataaatcttaaatgcatagtataattaatttttcatatgactaccactaccactcagatgaaaatatagaatactggctggaagcaaatggctcatacctgtaatcccagcattttgggagaccaaagcaggaggatcccgtgtggccaggtatttgagaccagcctaggcaacatagcgagaccccatctccacaaaaaataaaaagtaaaaatattagccatatgtggtggcacatacctgcagtcccagctactcgggaggctgaaatgagaagatcagttgagtctgggaggttggggttacagtgagttatgattgtgtcacttcattccagcctgggctacagagcaagaccctgtctctaaaagaataaaaaaaaatatagaatacttccaacacttcagaagatccctcgcgccctcctagtcattatcccctgagggtaagcactattctgacctccatcaccatggattggtttcgcctgttcttgaactttatattaatggagatgcattcacgctgatacttgcggcaatagtttgctcattttcgttgccatatagtattccactgtatgaatatatcacaatttatttattcattctctttttgatggacattagggttgtttcaaggttttggctgttatggataaagctggtatgatcattcttattcaggacctttaatggacatttgtggtctttttacttgagtgttgtagtaagtagtataatagccccccaaaagatatgtccacatcccaaccctcggaacctgtgacagtgactttatttggaaaaggagtctttgtacatgtaattttttttttttttgagatggagtctcactctgttgcccaggctggagtgtggtggtgcaatctcggctcactgcaacctctgcctcctgagttcaagcaattctcctgccttagcctcccaagtagctgggattacaggcatgcaccaccacacccagctaatttttttttttttttttttttgtagagatgggatttcaccatgttggccagccttcaccatgttggtcaggctagtctccaattcctgacctcaggtgatctgcccacctcggcttcccaaagtgctgggattgtgggtgtgagccaccgcacacagcttgtacatgtaattaaattaaggatctcaagataagatcagcttgtattatctgagtgggctgtaaatccaatgacaagggtccttgtaagagacacagggagtaggagaaggccatgtggagacagaggcaaagatgagggttatgcagccccaagctaaggactgtttagagccaacagaagctggaagaggcagggaaggattagagccttcagagggaacatggcgcggctgacaccttgactttggccttctggtctctagaacactgagataataattctgttgtttcaagccacaaagtttgggatcatttgtgacggcagccaaaggaaattaataatacaaaagttcactttattaatactcatttatatttgtttgtgatgtgcacaacactccaatggaaattttaaaaagtgtttggagtacagactttcccaagcctggctaactttttcttccttctctgggaatggatgttttgcgcagtgtacagaagtgtggagagtgaccccaatgtccttgttgatgtgtgtctgtaaatcttacctgtcacagtgtgggcactctgagagccctgtgtccccaccagaagcatctgttccttatgcagcctgagtgtcctctgctagggtggccagttcccctcctcctgccctgcctttttgcaggttcacaggtgcaagactggctgtttcctgttaatattaactatacttgaattttcaaggatttttttaagaaaaaaatatataatgccaatacaaaaaaaaacacaggaaaaaaaattaaccttactaaactaaacctgccctgataggagggttcttctcacaaacctgactgcagagcaaaatggaattgctccaatttctccctttgcaaacaggcatgcatcaacttctcattttaacaactttctttctttctctttcttctttctttctttctctctctctctttctttttttcttttttttttttcagacagtcttgctctgtcacccaggctggaagtgtagtggtgcgatcttggctcactgcagcctccatctcctgggttcaagggattctcctgcctcagcctcctgagtagctgggactacaggtgcacgccatcacacccagctaattttttgtatttttagtagagagggggtttcaccatgtgggccaggctggtcttgaactcctggcctcaagtgatccacccgccttagcctcccaaagtgctgggattacaggcatgagccactgtgcccagcctttaacgactttcttaataagtggtgtgggaaaacacccagagctaaacaaaaccaacatggggaagtgacaagcatttgagaattcttacatttctcatagctgtattcccccagaatctggtatccagctttttttttttttagtctggagacaggttggagtgcagtggtgtgatcagggcttactgcagccttgccctcatgggctcaagcaatctgcctgcctcagcctcccaagtagatgggtccacaggcatgtgccatcagcctggttaaattttctattttttttggtgaagatgaggtcttgttatgttgtccaggctggtctcaaactcctgggctcaagcaatcctcctgcctctgcctcccaaagtgcagagacgataggcaggagccattccagcatctcatatgatgtggttgttgaaatcgactctctcgggaacatttaacaatagctaaaacagttgagtgggcactgggtgtgtgcttcagctcaggctcttacttatattgttagattccctcaaaatccctggaggtggggaatttccttgaggtgggggttttccacgctttccagatgagggctgtacgctcattgactagaggcaccgtgtctaagtgtctgaggcttaattcccattctctagaagagcagctgactatgtgtatgtcagtgggaaaggggagagcccagaaaatcattgcagtttatcacagccacccccaccccctccatcactgcagaaactgagcctccactatcttggagtttccttgaagagttcccagtcttggtgaaatatgggatggacggccaggcacagtggctcacgcctgtgatcccagcactttgggaggccaaggtgggtggatcactttaggtcaggagtccgagaccagcctgaccaacatggtgaaaccccatctctactaaaaatacaaaaattagccaggcgtggtggcgcatgcctgtaatcccagctactcgggagactgacgtaggagaatctcttgaacccaggaggtggagcttgcagtgagctgagattgcgccactgcattccatcctgggcaacagagcgagactctgtctcaaaaataataataataataataataataataagaaatatgggatggaatttccattggatgttaaagatccttccaaaataggtattttccacagaaaatgttatatttggtctgacaactccttgcaaaaatgaactcaaatggtcaggaatatttgttgctctaggttttcagaagcagaatgggcatcctttcttagaatacattctgggcccctcagggtgttcagggtgggaataaagtatataaaatgagaagtcaaaacagggaagaggtactaggggggaagctgggcagaggaaaggaacccttgggaggcccaaactttaatgctctggttcataaaatgcaaaaaaaaaaaaaaatccattctcatccctcctgtcctgttattgtcaagatgctagctccttggacaattcaggatacaccaagctttctccccggatagccgcaagtttaagggcaggaaatggccttggactgggtgcctttgctgagagaacagcagcactttgatccaagatgtccaaaagacaaagcagaagttcatgagaaacagaggccccagcatcacttggggtggcggggagggacctgtgcagcttgcgccatggacacctcgttagtgcataggagtgcatcagttttacagaaacggggctccatctagcccaaagggagaacgcccaggctgtgatcaaaggattgagggtaggacatcaaaggttagggactttcccgagtggaaaatatgggaagggattgggtcaaaaccttacagagaatgtgggcgagatttggtaagacgtcaaaacttaaccagacccaagtgggcatatttaggggaaaaccagaagtcatagttcattggaaacagacagatacggtcaacaaatcttcatgtatctggggagtgcaaatatcacgttattccttattgtgtgtcagaaatacgcaagcccacactgtgttgagtacctgcgtgggagtgggagatgttcaggcctgcacacgacctatctgtgcctcagctcttcttgtggaaaagtgctatagaaacagcacaagatctggaccatccaactcaccaacccaccccagctggaattcagtaggcagtcccctgaccctgttattcctctgaatatgagaaaggcagagataacagaataggagggcgatggtttcaatccacagggctctttggatgagaaaacatgggggtgttgttaggtagccctggtctgcttgatatttcatttctggccaggcgcagtggcacatgcctgtaatcctggcactttgggaggctgaggcaggtggatcacttgaggtcaggagttcgagagtagcctggccaacatggtgaaaccccacctctgccaaaaatacaaaaattagctatgtatggtggtgcacgcctgtaatcccagctacttgggaggctgagacaggaaaatcacttgaacccgcgaggcagaggctgcagtgagctgagattgcgccactgtgacaggcgtgggccatagcacagagcctggtaaccaccattctattctctgtttctatgtatttgagtttttttcaggttccacatataaatgagatcatgcagtatttgtccttctgtgtctggcttagttcacttagcataacatcctccagattcatccaaatggcagggtctcctcctttttgaaggctgtatagtattctgttgtattgtataccaagtacctttatctattcatcactgatggacacttaaggtgtttctatgtcttggctacggtgaataatgccacaatgaacctagtccaaaatgggaagtcctcaaatatccatcaatgttaaatcattaagtaaatagtggtatttattcacaatttatttcataggtggaatgctacacaatggtaaaaatgaacaaagtttagccatacacaataaggcggatgattcacaaccacaatggtaaatcagaacagctgggccgggcacagtggctcacaccagtaatctttgggaggctgaggtgggaggattgcttgagcccaggagttcgagaccagcctgggcaacatagcaagaccctgtctttttaaaaaatacaaaaattaggcagatgtagaagcacaccaggtacttgagaggcttaggtcggaggattgcttgagtgcaggagttcgaggctgcagtgagctgtgatggtgccactgcactcaggcctgagcaacagggcaaaaccctgtttcaaaaaacaaaaaaggaagaagaagaaccctaaacaaaagaattctaagtgtatcgttctatttgtatgatgttcagaaactggcaaaacgagagcttttgggaatacgcactcaagtagtaaaactctaaagaaaagcaaaggggctgggcgtagtggctgatgcctgtaatctcagcactttgggaggccaaggcgggtggatcccttgaggcaggagttcgagaccagcctggccaacatggtgaaaccccgcctctactaaaaatacaaaaattagcggggcgtggtggcacgcacctgtaatctcagctactcaggaggctgaggcaggagaatcacttgaacctgggagatggaggttgcagtgagccgagattgtgccactgcactccaacctgggtgacagagctagactctgcccacccactcccgaaaaaaagcaaaggaagggaagagggcagtgcttgtcttcaggaggaagagggtttggtgggaagacacttgtggtgtctaggggtgctgaccgcatgctttttcttgatctcagtagcggttgcaaggtgtatactttataattacatattaagctgtgcattcatattttagtcccttttctgcgtgtatcatctgtcataaaaaggttttaaaaaacatgaagcaacaaagaaaaaattgctgatggacacttatgtgtcttcacacaagatatgaaagaactttacaagaaaaacttaaaaaaagaaatagagatgggatctcaccatcttgcccaggctggtctcgaactcctgggctcaagcagtcctccgacctcagcctcccaaagtcctaggattacaggtgtgaaccacagtgaccggcacccccacc[143 bp omitted]tgaaaccccatctctactaaaaatacaaaaaattagctgggtgtgatggtgggcgcctgtagtcccagctactcaggaggctgaggcaggaggattgcttgagtccaggagttggaggctacaatgagtatgacggcagcctgggatagtgcaaccctgtctctaataaataataaaattaaataaaaaaataaaaatgtaagggaatgataaccatcaaacaaagggcaacggagacttctgaaaggaagacaaaagtggaatggggaggggcccaaggcagtcacagggtactccctggtaatgtgctgattctcaaactgagttggtggatggagttagggggtcgttttattgttctacaccccatatcttataacattttactgttatacattataacccacatctacgggtatatgtcaattctcatataataaaactggcacagtggctcatgcctgcaatcccaccacttttggaggccgaggtgggaggatcacttgaggtcaggagtttgggaccagcctggccaacatggtgaaaccccgtttctactaaaaaaattagccaggcatggtgatgcatgcctgtaatcccagctacttgggaggctgaagccaaagaattgcttgaacctgggcagtagaggttgcagtgaactgagatcgtgacattgcactccagccgggcaacagagcgagagtccatcccagaaaaaaacaaaacaaaacaaaaaaccaaaaaaaaaactggaaaagtaagagaaaagttcccagacctcagccttggggaatactaccagctttcacggaccagggagaggggcaggagttgtgcacgaaacgagatggagctgcatgaggtgggagaagaggaaaccgtgacatcgcagcggccaagggagccttccaggaggaagaagcgtctcccagggtcagggcttctaagagcagttggggaagacgaggactggaatttggatttggccacctgggggtgttttctgaacttggaggagcattcttgtgcccctacgatgcttgcagcagctaaggactccagacctgcagagtctgtcctgagacaggtcagacctcggcggtgggacgggaaaggggaactctctgtctagagacttgcgctccgatgtagttggaggtgctacactgtggctggccacagaccaacacgagcaatggaccacgagaggcctggggtagttagcctttccttcctgtgcagccaagaacggaaggatgagaggggttctttctgcctcctccttggcatgagcacctccacctccatgcccactctgtcctttctcccaggagcagctggccggagagtaacacgactccagccggacatggtcatgactatttcagcctgcaaggtcatgactctctggcccacctaggactcctaggggaaaggaagtgcctggtctaccgcccttcccctgcaagtctgaatgctgtgtggacagaggaggaggacccaataaggtaggggtattggagtactcgggtgcctgggaagatccaagcccggcctatagggtcaaggtcttttccaaaacaggggaaaccctttctggttcccgaaggtcctcccttccctattcgctgaacaggtgggtgccaagaagcccctgtcttgaggacagagagactgcggtctggcctccccagacccaggcagcctctaacatcacagccacagagcagaaactggcctggcttcctcccaggcccagaaggccccagctggccacctccctttgtttgtcttgggaggggcaactgctaagcaaacagggaaggggaatcccgattcggcctctctgtctgtccggctagccgttacccaggcccgggctctggtgcccactgaggcctggctccttcctgaccctttgtgtggaagggacacagggcaggagtgggtacagagaacacccagggctttccgaaaaaaatagcccaggcctcccacagatgagagaggagctatgtggttcggtaaacctcagttccagctacaggcaaatgggattaactgagcacttactgtgttggggccctggcctagccccatgcatgccagagccctccagatactgcctggccaccctgcagggtcctatcagatctcgagtctccaaaagaggaaacaggcttggggtcataagggaatgaggttagcaggggtggtaatcccacccagatctctctgactctcagatcacgggttttttttttttttttttttttttttctgagacagggtctcgctctgttgcccaggctggagtgcaatggcacaatcatagctcactgcagcctcaaattccgggattctcatgtgatcctaccgcctcagcctcccgagtagccagggctatagggacgtgccaccatgcctagctaatttttaactttttgtagagataaggtcttgctatgctgcccagactggtctcaaactcctggcttcaagtgatccttctgcctcagcctcccagagagctgggattacaagcatgagccactgcgcctggtccccaactgtgctcttaatcatagctcatttctcttagtggagccacgggggaaggtggtaagggggcttaagcgggagctctatccctcatctcttttttctctttcccagagaccacaccgctgttccagaccctctccatggatgatgtcctgcccctgatgccttgggagaccctgttggcacagggcagtccccagggctcgcctgacctcccagcagggcagcggaagcagcagccacagggtgacagggcccagggcctggcctctgagtcctggaagctcctggaggtgcccatcattcacataacgccatccagtgatggggagtcccccgcctgcaccccaaccccccgacgccggcagcagcagaggatgccagacccgcagagtctgtcccaggacaggtcagacctgggcagtgggacaggaaagagggtctctctgtctagggagggttctctctgtcaagggtgggttccttgtggctgcgggtcagagcacaaccttagccccacagagggctgactcaaagccacgaaacagatgcacaaacaaaaggtaaaaactgagggtgtgcgttgggacaaccagctatga[137 bp omitted]catggtaaaaccccatcttgactaaaaacacaaaattagccagcgatggtgatggatgcctgtaatccaagctattcaggaggctggggcaggcggtttgcttgaacctggtaggcggaggttgcagtgagccgagattgcgccactgctccagcctgggcgtcagagcaagactctgtctcaaaaaaaaaaaaaaaaaagagtggatgggtggagagggaccccacccagtgtttttcaaactgtaggtcaagacccatttaagggccataaaactaatacagtgaattgcaatcagcccttgttttttgttttttgtctttttctttttgagacagcatctctctgtcacccaggctgaagtgcagtggcatgatcttggctcactgcaacttccattgctcccccctccacccagcagctgggaccacagatgtgcaccaccacacctgtctattttttttgtatttttagtagagacgaggtctgaccatgttgcccaggctggtcttgaactcctgagctcaggtgatgcaccctcctcggcctcccaaagtgctgggattgtgagatgaggcacccggccgcaatcagcacttctttatccaaatcaaaataaaatagaattgcaaataacaccatgcgtgaggcctaatgagggtaagtgtggtttcttacaacttctgtggcattatgtgtatttctaagtgcgtgctggaagcccatgtgaaaggtatttcctgctgtagatcacaggccaaaaaaacaaaaaaaaaaaaaaaagaagaagaagaaaaacaaagaaaaaaagaaagtttaaacaaaacttctgaaaagaaacactatctctggtacaaggagacaggaaatgggaggttcagggccatagggggaagaggaaagaactctaccgaccctgaatagaacaagcagccactgtggtttcttccaacaagggacactccataagcgttaaagtttaggaagcagagctttgtgcatggatgtggagaaatcgcagaaacaatgataatgggggacagcaagttgcaaatgaaacagagggagcctaatcgtgtatctttttaaaaagatactggataataggtgatagtgttggtggatgcctcctgatgtagaaaaaggacagaaaagtacacagggtccaggcgtgctggctcatgcctgtaatcccagcactttgggaggccgaggcgggcagattaacctgagatcaggagttcaagaccatcctgaccaacacagtgaaaccccatctctactaaaaatacaaaaattagccaggcatggtggcgcatgcctgtaatcccagctattcaggaagttggggcaagagaatcgcttgaaccgaggaggtggaggctgcagtgagccaagatcgagccactgcaccactccagcctgagcgacagagcaagaccttgtctcaaaaaaaaaaaaaaaaaaaagcgcaggaaggaaacacaccaactgcatggcaggcagaaggctccttggggggcacgggaagggaaaggagggatggggagccaggcctttggttgtaagtgtaatcatttatttcttttaaaaaaaggacctgaagcaaaatggcaaaatgtccacatctattctatataggtacaggggacatagaggactgttatattttcttcctttttttttttttttttttttttgagatggagtcttgctctgttgtccaggctggagcgcagtggtgcgatcctggctcactgcaacttccacctcccgggttcaagcaattctcctgcctcagcttcctgggtagctgggattacaggtgcaagccactacacctggctaatttttttgtatttttgatagagatggggtttcact[131 bp omitted]cattacactagaagaaacagaccaaagagaaatctaaagagatcagttggacagaggaaggtggtgggaggagggcctctcttccattggccggtgggaggcagcaaatgtcagatggtggatgggggttttagaggtgggggttagcatgagaggtagggcacggcgatagggggggtgctgtccatgcagagggaataaccagtgcaaaggtcttggggtaggaggcaggaaggtgcctggtgagttagaagaacagcgggtaggctggatggggggtgtgagccagggggagatgaggagctgaagtcagagagctgacaggggccttgggtgccaaggtgaggactttgcttttacctggagtgaggtacagctggggcagggctctgagccaggagggtagttaactgactcaggtggtcccaggctctctctggctgcaggtgagaacagacagtaggggcagggatgggagcagggagatcaggcaggagaggatggaggctgggccagggcgtgggcagcggaggaagaagagtttagaatggagcgattgattttatacgtggagcccacagtttgtgacggattggatgtggtgtgaaggaaaagagagggtcagaaaagactctgaagttctgggcctgccattcatcaaaatggagaagtcaggtgggcttcttttgcaggaggaggggaagggttgatggagagggttgggaagggagttttttcaaaagaggcggggacagcgtaccctggagagcgctggggagccacagccccggagctgtgaggtgggactcgcatttctgtgtggttgggccaggagtccaggacaccacctgactctgacctcttgcagacggggcgggggaggggggacgcaggttatggcgtcagagcaggatcgaatccaactctgccgcctacctaccaggtgaccccaacaagtcacttcccatcttagaggccgggcttctccttccgtaaaaggactgattttgcccgttcctgcgctgtccccgggaaaagcccttaccaccgagttagtgggactcccagcactggggtgatgagcgcaaggtctcagcacagataagagccagggaggctggattctgacttggtacttggcctggctgaccaaaactgggaagtccctagaaacggaggcaccggacctcctgggaccaggaacccgggctcagagactgggagagggaaggaggaggcggccaaccggccccaccccttcccgccagcttcaggccccctcccccatacatacacctcggtttcccagcatctccagtcctcccccaccttcgccccggctctcaggttcctccctgggaggtccaggagcttctggccaggggcatagtagttgctagggacccttttctaggtactaggggagggggctccccaacctgcgggcaggcagctgcctccacgatgtttggttttaataaagtctctttgtttccttctctgtctctctgcccctctgctttcccttctctgtccagtccctctctccccggcttctccctccttctaggcctctgcggcccctccccgccttccctcccgggctgggggcggcgccgtgacgcggcggggcgggggaaggaagggggtgtcgctgacgccgcggcggcctccggcggctccggccttttgtgcgggcggttgggtcgggtgggggcggcggccgcggaaggccaggccggtgccctgcggggacgcccagcgcagcccagccccgcgcagcccagccctgccctgccctgccctgccctgcgcccggggcgcgcccaccgcgccgcatccatgttcgagtaaggaccgggcgactagagctcagggaccgggcgcgcgggggaggccaccggagggagggggcgccgcgggcttggggagggggcggagcggccgctgcagaggtcgggggcctctgcacatggctctggccggggcgatcggggtgggggcggggcagggggcccccgggcgaggggtgcagctggggagtggggcgcggacgcagggcagggcccggggtctgggtcgccactgccggcccgcgacgcactgggttgcggggtttggctgggggcccgcgggttcatctggcggggagggccctcaggcctggcaaccccctgcctggtaagccaggggtgagcgcgaggccgaactggggctccggcctgggatggagacaggatcgggaccagcccaggcccacaggccgcggagccctgggcgcgccgggagtaggcagccccctcctgcctgggccccctcccaccgtccttggctgttgcgggtctcggggctgccgggggtgggggcttcctgcgtctctccaggaccgcgtgcttgaggtcatggagggcggggggtcctgtgtgctcggaattgacttcttactccccttccggtccaggtgggcgcatgtgcttccgactgtgaattgtcttgcaagtgtgtgtacgtgtgtctggggctgctagcctgcagcagctttgggcctctgatagagttcctgcgtgtaacttaaccactaattctgaccgcggctctgtgtgtcactgtaagttacctgtgtgtgtctggggctccaaatctgtggctgtgagcagctggttgtgtgcgtgttgtgtctcattccatctgtagctccctgtgcaaatataaattacccctgtgtgtctgagtgtgacgttggagtgtttgtacatgtgtctggagttaccgtgtgtagcagctctgatccttcttgggctgtgtgtgttttaccattaattctatctgtagctccaagcgttgctgtaagttaccagtgtgcgtcccattgtgacttagtggtgtgtgtacaagtgtgcctggggctctgggttctaccatgaccctctgtgcctgcatatgcctgtaatttagctctgaaacgctcttctttttttttttttcttttgaaatagagtctggctctgtcgcccaggctagagtgcagtggcacgatctcggcccactgcaacctcctcctgctgggttcaagcaattctcctgcctcagcctcctgagtagctgggattacaggcgtgtgccaccacgcctggctaagttttgtatttttagtagagatggggtttcaccatgttggccaggctgatctcgaactcctgacctcaggtgatccacccacctcggcctcccaaagtgctgggattacaggcttaagccatcgcgcctggcttgaaactctcatttagctctgtgtgccaatgtaagttacatttgtgacattgttgtgtgtctggggctctgtgagtgtggctgtaacttaatttgattccatctttgtgtgaacattcccttgtgtattcctttgtgacagtattgagtggtgcctaggcctctctgtgtacagctgagaccctctgtggttttgtgtgtgtgtgaacagtgtgagaccccttgtggctctctgtaggcttggaaccctcccttctaagaccctgggagtacccagggcactttggaggcaataatgataactgacgttgtccacctgttacagttagtatagcatgtgccacgcattattccactacctggccactgtgtcctcgagatccacgccctgctcggctgcattattcccaagtcctgcttgactgtgagcatcagggctctccaccagctacagccactgacacctccaccccttgccactttactttttcttttcctttttctctttcttttagacgcagtctcgctctgtcgcccaggctggactgcagtggcacgatctcggctcactgcaacctctgcctcctgggttcaagcgattcttctgcctcagcctccctagtagctgggattacaggtgcgtgccaccacacctggctaatttttgtatttttagtagagatggggtttcaccatgttggccaggctggtctcaaactcctaacctcaggtgatccacccgcctcggcctcccaaagtgctgggattacaggcatcagccactgcgcccagccccttgccactttagaagtagccttttctctgtcttccctgccagatggtgagcccagtgcgggcacgggaacaactcagtggggatgtgttggctgaccgtgggacctgatttacctgggactatgtatgtgtcacctggggtcttttgggactggtctttcactgtatggctgtctttggctctttgctgagacttcctcgtggctatgtgtgtgaatataatttatccgggactttctgtgggttgctgtatgtttctgtgaccctctgcagctctgtgtctgtgtgcacacatgcatgtgtctggataacttttctgggaaattgccatgtgactgtagcagactagcaatgctgcaggtgtgtgtgtgtgtgtgtgtgtgtgtgtgtgtaattactctgtggctctctgtagcatacctatgatgctgttgctctgtgcgtgtgtgtgtgtgtgtgtgtgtgtgtgtgtgtgtgcatatgagagagagagagaggaaagagactccttgcaattgtagggaaatgcagtttacccctgacacctactgtgtgacaatcattgagtttcccttttatgcacacctgtggatgcatccgcccttttctgaccagaggctgctctgggtccactggggcctaggaagttggaggtcaggtgtctgcggaagcaaaacaacatcccttccgagtctcctcgcccctataacagtcccccaggctcctcccttcactctgccttcagctatcctggttgggcagccgcagggtccgcccttgagtacttcctctttgcccagccctggagcaaaaactgggggcgtggtccctgccctgtctgtgtgccttgagcctctcttcaggattccggcccccaggccctgcccctagatctgtggctgcgggaaagtagggcaggtctgtgtttcaggctagagggctgagaaaagcaggcaggggaggatgtggtcctgctgcttaggagtctctccctgctcaccagtgctgtctgggtgaagccaaactcctgactagggtcaccaggcctgtgcacctccgctactccctcagccccactggccacctcactcacactcagacctgccaggctcagtcctgtccctgagcttgatgttctccacctggagtcttctcccagcctttgccacatgtgttctttgtcctcaggtgaacaagtgggctttgttcaggaaggcttttgctgactgttactaaagaaattggttgggcacagtggctcatgcctgtaatcccagcactttgggaggccaaggtgggaggatcacttgaggtcaggagtttgagaccagcctgggcaacatagcaagaccccatcactacaaaaaaactttaaaaatcagctaggcatggtggtgtgagactgtagtcccagctatcagggaagctaaggctggaggatcgcttgagcccaagagttcgggcctggagtgacctgggaggctgaggattgagaattccttgagcccaggagttcggagctgccgttaaccatgattttgccactgtactgcagcctgggtgacagagtgtgaccgtgtctctaaaaaaaatttaaaaagcatctctgcccccctagttgtcccatcccttatctctgtggtcctcaaacttgaatgtgcgtcggaatctctggccccaccccagttctgattcagaaggttgggagtgggtcctggactctgccttttgaacactttccaagtcctgcctgctgctctctggggctcatactgagcagcattgctttatggcgttcaccagtgtctgaggtcgccatccctgctcacttgttttcttactgacggtctatgtttccctgtttcagcgtcaggtccttgcaggcaggggcttgtatgggctttgctcacttccttgtggcgggtgcagggtatttagaggtgaaaggctggagttgagggtcagtcatggaggcgcctaacatcaggcgtagtgcttgtgaggtccctgtcagggtcagcagagcgtcatgggcagtggtgcactgggctggcagccgcgctgtacactccatcttagtccgccagtccctgtgggagggaaagcagcgtagttaaaccaggtgccctccaggtactgggctttgtggatctcacctcacctccatctctgtgcaaccctaggaggtgggcactaattcccatcatacccaagaggaaactgaggcacaggagggttcagacactagctcagggtcacacagaaaggacgcggtggcacttgactggaaggtccttggactgtggggcccacactccaggctgctgccctggagacctgcagggtccaaggagtcgtgcacctgctggaacccaagttctatggggggcggggaaggagggccgatcacccaggccatccccaacagtatgtgctcacggagcacctcctgtacgccaggccctgctctaggtgatggggacactcaacatcgtgggtgggggttgggggtggggagagaaggataagaactagggggaaatactgaaggtcccgggaggcagcagggagacttgctttgcagaaagagagcagggagggggatcgggaggcggggtagggggtgttaaatagggaggtagggaaggtgtccactgagcagagacctgagggaggtgggggagccctgtggatgtggatgtggatgtctgggaggaagggcattttgagcagaggcaccgaccaaggcgggagctgggagagggagtgcagggctgatgagggcagagagggaccacccaggaggaccctgatggactcagatgatcccaggctccctcccactacaggtatgggcagggatgggaacagggagaccagggaggaggctgctgggatggcccaggggaaaagcagtggcctgggccactggctgtttaattattttattcacgtattttattccacaaatttattttacaagtgttacatgagtgcctaccctgcatcctgtcccgcattgtgctggggacagagcagtgacccacagacccgtgaaggacttggacctgtcatcagacagtgacggcccagagtagtccaggatgggagctgcccaggggactgtggggtcacgcatgagccaaagtcctgaaggacaaataaggatttgctaggcaaagaagaactacgatctggacagacagaatggcatatgttaaggcttggaggtaagagagacaactttgagttgccccaggtggtggagggaatcccacctgcaccccagaatacatcaaggcccctaaatgggaatcctgccttgaaataaaccaagcccatggccaggtgcagtggctcacagctgtaatctcctagcactttgggatgctgaggcaggtggattgcctgagctcaggagttcgagaccagcaacgtggtggaaccctgtctctactaaaatacaaaaaattagctgggcatggtggtgggtgcctgtaatcccagctactgcggaggctgaggcaggagaatcacttgaacctgggaggcgcaggttgcactgagctgagatagtgccactgcactccagcctgggtgacagcgcgactctttgtctccaaaaaataaagaaaaaagaaagaaaccaggcccgtatcctatggcaagtggtttgccgctttgagctagtttcctcctctgtaaagcagggatggtgaatcatatcaaaggcaccggcttgagaaataatacggttaatcatacggagagcttgacatatttcctgataaggagtcaacaaagaatgtccttttaaagttcccaacgccatccccacagtccttattacagttcgtgtttgcacagtgaagttgggagtgtcctgtttgttcagtgtctgcctccccaccagaaggctcattccccaagggcaggggccatgtcctgcgggctctactgatgccagctccagccagcgtgcagattattcatttagcctctggtggttattgagcattcactatgtgcctagagttttgggctctagggacccggtggtaaccaagacctgaaggtcacagtctgggtagacagtaaacaaacagtaaacaagcaggacactccagatagcctggggtgtggcgacagaggtgcctgccttaggctggatgatgcggaaggagagcatttgagctgaaggggacagagctggtgatgccggggccatggaaggacattcaggcggagggactacaaatgtggaggccttggcgtgggaatgagattggagagcttagggacaaaagcaggctgggatggccaggggagaggaaggacagggagagggaggacatgaggtcagtgaggttccagggccaaatcaccacaccaaggtgaggtctttgcttttacctggagtgaggtgcacccagggcagggctcagacctgactcagatggtcacaggtctcctctggttgtaggacaccagtgaagaggctgctggggtgtccaggctggaggtgatggaggctggagcagggagaaatgggtataataaaaataacggatgctgggtgcggtggctcacgcctgtaatcccagaattttgggaggccgaggtgggcggataacctgaggtcaggaaggagttcaagaccagcctggccaacatggtgaaaccctgtctctacaaaaaatgcaaaaattagcggggcatgatggcgggtgcctatgatcccagctactggggaggctggggcggaagaatcgcttgaacctgggaggtggaggttgcagtgagtcgagatcatgccattgcactgcagcctgggcgacagagagagaccccatctcaaaaaaataaaaataatagaaatagagctgggtgcagtggctcacacctgtaataccagcactttggtagtgcccaaggtgggaggatcacttgaggtcaggagtttgagaacagcctgggcaacatagctagaccccatctgtacaaaaattttttaaaaataaaaaagctgataacagtggtgtgtacctgcagtcccagctacccgggaggctgaggcaggaggatcacttaagcccgggagctcgaggctgcagtgagccgtgattgtgccactgcactccagcctgagtgacagagcgagaccctatctctaaaaagaaaataaaaataaataatggaaatagattttgaaatgagagatgaagaaaataaagaaattaagaaagatgcttagggttttagctccgacaactgagtggaaagtcgctgttcaataaatatttgttgtatgaatcagtaagttaattttaaaaataggaggtataggccaggcgcggtggctcacacctgtaatcccagcattttgggaggctgaggtgggcagatcacttgaggtcaggagttcaagaccagcctggccaacatagtgaacccccgtctctactaaaaatacaaaaattagccaggcatggtagtgtgatcctgtaatcccagctactcaggaggttgaagcaggagaatctcttgaacccaggaggcgaaggttacagtgagctgagatcacaccactgcactccagcctaggtgacagagtgagagattccgtcttaaaataaaataaaataaaacagcaggtgtctttgagagctcgctatgtgccatgctctgttagaattactttacatgggctgggcacggtggttcatgcctgtaatcccagcattttgggaggctgaggccagaggatcacttgaggccaggattttgagaccagcttgggcaacttaggaagaccccgtctcaaaaaaaattaaagtaggctgggcacggtggctcccacctgtaatcccagcacttgggaggccaaggtgggcagatcatgaggtcaagagtttgagaccagcccagccaacatggttaaaccccatctactaaaaatataaaagctagccatgtgtggtggcaggaacctgtagtcccagctacttgggaggctaaggcaggagaatcagttgaacccaggaggcagagtttgcagtgagccgagatcatgccactgactccagcctgggcaacagagcaagactctgtcacaaaaaataaataaataaaataaagtaagataaaggaagtgctttacatgtcctgatttgtttaagccccaaaacaactggatgaggacatgtatttatcatccctggattactgatgaagtaaccgtagcacagagacgttaaggagcatgttctgagtgtcactgctgggaagagaaacaggatggctgggtggatgggtgtgtattcggggatcaatgggtgggcctctgaaaataggcctgtccccgaatcccagcctgttttttccagttaacacttctcttcctcttcctgcccccagcaccacaccccactctggccggagcacgccaagcagctccccatcgctccggaaacggctgcagctcctgcccccaagccggcccccacctgagccagaaccaggcaccatggtggagaagggatcagatagctcctcagagaagggtggggtgcctgggacccccagcacccagagcctaggcagccggaacttcatccgcaacagcaaggttggtgcaagcccaggtggggtggggagagggctagtgggggctggccggtgatctaggggctcatcctgactcctctccttttctttgcagaagatgcagagctggtacagtgtaagtgtctgggcaaggggcttgctggagggctgggaggaccgggtgctgggccaggagccccaggctgcaacagtcaaggagtgcgtgctgagatggagtgggtgcagacctagggtcacgttctatgctattatttatgtgctgtgtgaccttgggtgagttacttaacctctctgggcctctctctgtccttgagaaacagccccaccttacaaggctgaagggaacattgaatgagtcagtgatgctggtgggtgcttggtacggggcccggcttacataagaaatctgtaaatggcagctgtcattgtggctactggtgtgttgtgtgcgttggaatctgtcagggacttaagagactgagggggttccaggagctttgtggggcagcattgggagtgtgaacccccatccaggttctcacctctcaaacttcctcagatgctgagccccacttataagcagcgtaatgaggacttccggaaactgttcagcaaactccccgaagcagaacgcctcattgtgggtgagtcccggacccccagtcccagctcctagcccagccctgtgactctccgccagcccgcgggcgccggctgagcctcgtgacttgggtgtcctcctgtctctccccgcccctctcagattactcctgcgccctgcagcgtgagatcctgctccagggccgcctctacctctctgagaactggatctgcttctacagcaacatcttccgctgggagaccacggtgagcccgcagcggggcagggtacaggggcgggggcccccatggccaggccccaccccgctcctattgaccctcctgctgtcctcagatctccatccagctgaaggaagtgacatgtctgaagaaggaaaagacggccaagctgatccccaacgccatccagatctgcacggagagcgagaaggtgacggaggacccggtgacgggaccacgcggtcccccgctcagcaggccgcctcccccaaacatgcaaagccccatttgttctgcaccctgagttctctccgagctgtccccttctctctgttctcccggcccaggcgcccatcacccctgacctgatccccgcaccagcctctcctctctttccctgcaacctgttacctcacacagctgctcaggaacagcagaaatagtaaaactcttccatgtatgtggcacctcagccgcccctcccttcgtaagtctccccgatgttgtgtcctgtccctgtcattgtggcctcatgtccgttggttgcaagatggctttctcaccagcggtccaacaagaagggggacaggtgtgggggacacttcccagcagacttctctttgtgttttgttggttaaaagtggatctggccaggtgtagtggctcatgcctgtaaccctagcattttggggaggctgaggcaggaagattgcttgagcccaggaggttgaggctagcctgggcaacatagtgagaccctgtctcttaaaaagcaaaaaattaaccaggtgtggtggcacgcacctgtagtcccagctactcactcaggaggctgagacaggaggatggcttgagcccaggaggttgaggctgcagtgagccgtgatcatgccactgcactccagcctgggtgacaaagccagaccctgtctcaaaaaaaaaaaaaaaaaaaggatcaactgaccattcttagtggcaaaggaggctgggcaagttccctgggctccccccatcacatcccagcccctctgggctgaccctgtctagagatgcatctgtcccctccttggactgggagctccaaggacagggccaggggtcgtctccccatcccagtgattctggaattgtccagggcagggccgggcgcaggacagacgttttgtggaactaatgcaggggtgaattagtggattcatggggccaaagatgtggcgtcagcgcagatgagggtggcgcttccccacctctgtcctggtcgctccccaacctgctcacacctctctctctctctctccctgacagcatttcttcacttcctttggggcccgtgaccgctgcttcctcctcatcttccgcctctggcagaatgcactgcttgaaaaggtgggcctgggtgaggcccgggtggggatggggggtttccagggggaccatggagccagggaccccagaacttgcggagctggaggcagccctggctcttctccatgggcaccaggcccagtgcccctgcagctcctccctgggccccacctgaccccgaagctgagtctctggcaaagggacatgaattggtgtaaaccgtcgtaattcttccctggggctgggaatgattttcaccctgaaggacatccaggttccactggcagcgggggagtgtggatagaggctgggaggtcatcacaggatgccggctatggctggtccacagcacctcagagagccccagccccatcctccggctgagcggcactcacgcgctgccttctcagaggctccgatgtccctggagcaggcaggagtgctgagggtcccattcagcatcctgagagagggacagcgcacagtcaggccctaaggaggacagggcagagccccgggattccagccccatcccctggggcaagtgattgaaccccatctgtcaaatgggggccatccccacttcacagcacccagaattttgcccagaataagtactcagtcatgtcagctcttatgagcagagtagcccagcggttagctccctcgccaccccctctgccccccggctgtagaccagctcccctggggtcacatctcagcactgctacttcctggctggaccccagcatgtcaccttgcacttctcagcaccattgtcttaaaaggatgatgaggttagcacctactttccagatggttttgaagatacagtgagttagtacatctgtaaagtggttagaagaatgcacctagttgaccaggtggcaaatgtctgctgctatcatcacttactgttaactgtcatcactgtcattcagccactctggccatgggtggctgaaagctcaaggctcccgaggacacctgggaaaagattcggggggccacgatggcataggcatgggagactcagccctggagtctggcagggcttgaccaagtcacttggtgaccttgaacacatgactttccctacatgacttccccttcctgggactccgtatgctctgtaaagatgggaacattcatggctgggcacggtggctcatgcctgtaatcccagcactttggtagacgaagacgggcggatcgtggtgcccacgaggtcaggagttcgagaccagcctggccaacatggtgaaaccccgtctctactaaaattgcaaaaattagctgggcgtggtagcacgcacctgtaatcccagctccttgggaagctgaggtaggagaatcgcttgaacccaggagggagaggttgcagtgagctgagatcacaccactgcactccagcctgagcgacagagccagactccatctccaaaaaacaaacaaaaaaagatataaaaaaaatgggaacattctctggccagagtattgtggggacttgggaagcaggaagtttgagtcctgggcgcaggccctggaggggctgtagcaggggattccccgcttgctgaggccaggtctggtgcgggagatcgtggctgcctccttgtggaagccaggggaactgcggaggccgagggctggtggggaatctggcgggccgggctctggctggggtgagatggaggccaaccccaggtcccgcctccccagacgctgagtccccgcgagctctggcacctggtgcatcagtgctacggctcagagctgggcctcaccagtgaggatgaggactatgtctcccccttgcagctgaacggtctggggtgagttggaggtcaaaggaggttgaagggttcgggggagaacaggacggtcggcgtgcagagttcctggagtgctggggggcctgagatggttgtatgacgtctggaggattcaggagggtgtatggggtctcaaggacacagcagtcccgcttcctcccctttcccacaggacccccaaggaagtgggagatgtgatcgccctgagcgacatcacctcctcgggggcagctgaccgcagccaggagccaagcccagtgggttcgcgccgtggccatgtcacgcccaacctttcccgagccagcagcgacgcagaccatggggtgagcggtgggttggaagaggggtgggatactgataggaagagagaggagggctgggggtgcagtgggagaagaacagcctgacagatttggaggggaatggatagggggacaggggaggcctggatggaggaacaggacagggaggggaagacggacatgtgacagggaaagagagacagggaagagaggggacagacagaaaggatgagagacagaagggatgggagatgggtggatagatgaagcagcagacagacagacggacaggacaggtaagaaagcttatggctcaggcatctgagacaagcctggcaggggctgagaggggccctcatctgggtggccccaggctgctcgcagctcagccgtgagccctcggtgcacacaccaccccgggtctgcacaggctctggaatccttgtggccagtgtggacttgggagccctggggctgggatggaggtggccaaggctgcatcgggcctttctccacaggcagaggaggacaaggaggagcaggtagacagccagccagacgcctcctccagccagacagtgaccccggtggctgaacccccgagcacagagcccacccagcctgacgggcccaccaccctgggccccttggatctgctgcccagtgaggagctattgacagacacaagtaactcctcttcatccactggggaggaaggtgaggcaggcgggcccaattcattcgcctccggtacttgcaagcctcgctcagtcttaagcaagaggggatggattcgcccgcagcactgagaatccaggggcaggcgggatggcgttcaggcgctgttgctagaaatctctgtctttactctgttttgaaggcagcatggcagggtgaacacaagcacagactgaaggcagcttgccgcggttcacatcctggtcacaccacttcctgaccatgtcacgtgggcaaattatgtaacttctctgagcttgctttcctcctctgaaaatggggttaacaatgataatacccacttcataggattgttgttaagagactataaatgaggctgggtgtgatggctcacacctgtaatcccagcactttgggaggccaaggtaggaaggattgctagaggccaagagttggagaacagcctgggcagcaaagcaagaccccgttttgtacaaaaaagaaaaaaaagaaaaaactaggtgtggtggtgcacacctatagtaccagctacttggcagaccaaggcaagaggatcacatgaggccaagagtttgagacaagcctgggcaacatagtgagacccctgtctttacaaaaaatttaaaaattagccaggcatggggtcatgcaccctatgtagtctcagctactggggaggctgaggcaggaggatcgcttgagcccaggagttggaggctgcagtgagctatgattgcaccactgcacttcggcctgagcaacagagcgagaccctgtctctaaaacgaacaaagggagagaattaagtgatttcatacatttaaagcacttgggccagttagtaagcattgactattagtatttctattatcattattgtattcattttctctctccactaattttcagctagcctctattcttgtctcttatggggcagagatggcctcagccctgccccagaccagcccaatgagagagagcagcctatttttcctagtgtctacagcggacaccctagggttggctctgattgggccaacttgagagtgtgcctgcccctgaaccaatcactgtggttgatcggatagacctgggccacccactcacccctgaaccaattgctgtgcccctaggttgatgctcccaggaggcgtgctatctggtaatgaatccctgtgatttaaatctcagggcctaggtgtgttctccacccagaaccaagcacagtggctgtctgtctgggcctggagcacgtgcccaccctcaacccatccctgagtcacaggagggctctgtgtcagtgtccagctgtgctccaggaggtggggtccgcccatgcacactacaaggcctgggagtggggaggcgtggcccgcagagggagggaggagtggaggcagtcatcatcctcggctctcctctgtctccagcggacttggctgccctgcttcccgacctctccggccgcctcctcatcaactctgtcttccatgtgggcgctgagcggctccagcagatgctcttctcggactcgcccttcctccagggcttcctacagcagtgcaagttcacaggtcagcgggcgcatgaaggagaggctgaggttacccaggtgcaggggaggggtgaggaagggtagcccaggacaggggaaggcactgctagccagtggggcaaggcgaggtggtgaaaagcaatgtctgtcagaccagaagcagctctgccacttactagctgggtaggcttgggcagagttctgagatgctctgtgcctcagtttctccttctgtataatgggggtatgataatagtacctggcttattggttatcatgagaactaagtgagttcatactagaaaagttcctagagcaataccatatagtaagcgtttaataaatacaagttaagaggctgaggcggggctggtgcggtggttcacacctgtaatcccagcactttgggaggccgaggtgggcagatcactagaggtcaggagtgtgagaccagccagggcaacatggtgaaacctcatctctactaaaaatacaaaaatcagctaggtgtggtggcacacacctatagtcccagctacttgggaggctgaagtgggagaattgcttgaacctcggaggcggaggttgcagtgagctgagatcacactgcactccagcctgggtgacacagccaaactctgtctcaaaaaaacaggggcggggggtggggtgctgggcacagtggctcacgcttataatcccagcgctttgggaggccgaggcaggtggatcacctgaggtcaggagtttgagaccagcctggccaacatggtgaaaccccatctccactaaaaatacaaaaatattttagccaggcatggtggcgagcacctgtaatcccagctactcaggaggctaaggcaggagaatcacttgaactcgggaagcagaggttgcagtgagccaagatcgtgccgttgcgctccagcctgggcgacagagcgagactctgtctcaaaaaaaaaaaaaaaaaaggtgggaggagggccaaggtgggaagttcatgtcagcccagaagttggagaccagcctgggcaacataatgagactcagtctttacaaaaataaaaaaaaaaattagctgagcatgatgctgcccacccgtaatcccagctactctggaggctcaggtgagagaattgcttgaacccaggaggtggaggttgcagtgagccaagatcatgccactgcacctcagcctgggtgacagagagagactccattaaaaaaaaaaatgctcctgaggcctccccagaagccgagcagatgtcggcatcatgcttcctatacagcctgtggaactgtgaacccattaaacctcttttctttataagttactgagcctcaggtatttatagtaatgtaagaatggcctaatacagagctcctcagcctgacacgccagcccttttaggacataagcatagttttgggggccttgtagccccccaacacaaggcaccatcttcctgactgcaggggatactgcatgtctcatcaatacagaaaaagaaacaaagagaaactcccatctgacacgctcctcccctgcttgaatctcttttgtagcctcccaagttccttggctggtcccatgtcaacccttcagcctcacccagagctgtggctgcccctctccatacctggctgccccatcccagcctcaggggacttctctcaatattggcctccagcctcagggcctttactggtatcacgcggcctcctgggctcctctgccccgaccccttccttcctcagttcctccttcaggccttggttttgatttcacatcctcctggcagccttcccttaccttcctcagatcccagatacccccagatactcacagcttctgcccttaactcacaccatgccagtagtgtgtggtttttatttatagatatttcctgttgttctcaagagattctgggtgctaaggacaggagttcatctatcctggtctcccactggcctccaagccctgcataggcctgacagagtggacattaaatttgtgatcattaacacatatttatttatttatttatttatttttgagtcaggttcttgctgtcgccccagctggaatgcagtggcacagtcttgagtcactgtagcctctgccttctgggtttaagccattctcctgcctcagcctcctgagtagccgggattataggcgcccaccgtcacgcccagctaatttttgtatttttagtagagacggggtttcaccgtgttggccaggctggtttcaaactcttgacctcaggtgatcctcctgcctcggcctcccaaatttcccgaagtgctgggattacaggcgtgagccactgtgcccggctgcctcagggagcttttgatcatgctgaaaggcaaagggggagcaagtgagagagagtggaggggaggtgccacacacttaaatgaccagatctcggaagaactcactatcatgaagacagcagcaaaccatgagggatccgcccccatgatccaaacacctctcaccaggccctacctccggcattggggattacaattcaacatgagatttgggtggggacaaatatccaaactataccaaactcagactctgttctaggggtactggggagccatggagtgttctaggcagagaagggatagagtcaggcttggctttaacaagatgcccctggaccagatggggagactgaggccagacactcaagggaaggctggcaggggcactgggcaggcaaagatgggctgaaccaggagtgacgctcaggaggtttggtgaacacacagtgtaggtaaccatctaggggtttgagtagggggtgtccagggcaaggcctaccgctccagtgggagcctggaggaccctgggccacccctgagtgggggcctgggagatgcagcaggtttggggagatgctgaggctgtgtggagctcggtgggttcgaggggtccagggaccttccaggggaaggtgttcaaaagattacaggtccaatgctcagggcagaagccaagacgggtgcagagggggaaactgaggctgcagcagtggaggagatggccctgccccaacagctaaggttttaggctcctggaaggaaggtggggacacagaggagtggtggggattgggacaggtccccagagagacctcccagaaggctgagtctcctgtggcctgtgggcaaaggactggggtgtggcctcctcatgctgctcctccctcctctagacgtgacgctgagcccctggagtggggacagcaagtgccaccagcgccgggtgctgacgtacaccatccccatcagcaacccactgggccccaagagcgcctccgtggtggagacacaggtgggccaggtggggcagccgagtgggtggggcagctgggtgagtggggtggccctgacttctccggctctgtccctgcagacgctgttccggcgcggcccccaggccggcgggtgtgtggtggactccgaggtgctgacgcagggcatcccctaccaggactacttctacactgcccaccgctactgcatcctgggtctggcccggaacaaggcgcggctccggtgagtggtggctgggcccctccacccgatgccctggtggccccagggcctcctgtccactcctcaagtcagcagcagagccttggttcccaccctggtggaggaacagaagcgtggggttcctgaggcccttgtcctccgaatagtggagggtagaggaagagtggccctgggatggctcctcccatctacagagggtgtttgagcctcaagactctgaggatacagcaaagccaggcaatatcacctctctcagggagctcatattctagtggggaattggacaatagagaaatgatcaggaaaatctgcagaacattcactggcagttaggcctatggagaaaaatgaggaaaacacggcaggctaaagaagcagggtgtggaggcttttacacccgacacgctggtcagggaagggcctactgggaaagaaatgtttcaccaagaacctgaaggagctgagagcaactcatttgggacagcaggtgcaaaggccctgaggcaggggtgtgggcaatggctggagtggagtaagattgagtgagtaggagctgagattaaagtggtgaaccggggcccggcacagtggctcacacctgtaatcccagcactttgggaggctgaggcaggagtatcacttgagcccaggagttcaagagtagcctgggtaacgtacggaagccctgtctctacaaaaacaattttttttaaattagccagggtccaggtgcagtggcttacgcctgtaatcccagcaatttgggaggctgaggtgggcggatcacttgaggtcaggggttcgagaccagcctggccaacatggtgaaacccatctctactaaaaatacaaaaattagtcgggggtagtgatgcacgtctgtaatccctactacttgggaggctaaggcacaagaatcacttgaacctaggaggtggaggttgcagtgagccgagatcgggccactgcacttcagcctgggtgacagagtgaaactctgtctcaaacaaacaaacaaacaaacaaaaaacaagttaaaaaattagccagacatggtggagatttcagtgagccatgatcacaccgttgcacttcagcctgggcgacagagcaagaccctgtctcaaaaaaaaaaaaaaaaaaaaaaaggtgaaccagatgtggctcatggtgaagacttgactttacctggagtgaggtgcaaccaggccagggctctgagccaggagggcgctgacctgactcaggtggtcccaggctccttctggctccctctgttctggtgggaacagactgcaaagacaggtacaggagcagggaggccagggaggaggctgctgggacatccaggctggaggggacggaggctgaatcagggtgaggaaatggagggggaagagtttagattctggagagattttgcaggtttagctgacaggatttgctgagagattggatgtggcggtgagggaaagagagctcaaggaatatcccgaggcatttggcccaaatcactacaacttcggagctgcccttgacccagatgggggcggcagggaggaatgggtttggggaaagaccaggaggtcagtttgggactcagctgtctatgttgagctgagcccatgtggagctggggtgcagcagccgaatggaagaggttcaggggcatggtctggttaagacgtcagtctgtgagtagacagggctcaggccgccgggagcgttgcccaggtagtgggcatgggtggagaaggaccgagggctgagttggctggcatttgggctgggcgggtggtgtatggggtatccagggaagccatggggggtagggaacccatctgttttgtctgtgagtgacaaggggccctctctgaattaggggaaggaaaaaactcagcttgtgggacggggcagccagggctggagtcagacccttacctccttcccctgatctcccaaccccagagtgtcttctgagatccgctaccgaaagcagccgtggagcctggtgaagtcgctcattgagaagaactcgtggagcggcattgaagactatttccaccatctgggtagggacagaaggccggctggggcgtgggttgggggatggcctggccaggtatggacatccagagccccctctcttttacgcagagcgagagctcgccaaggctgagaagctgtctctggaggaaggcgggaaggatgcccggggcttgctatccggcctgcggcggcggaagcggcccctgagctggcgggctcacggggacgggccccagcacccagatcctgacccctgtgcccgggccggcattcacacctcgggtacgttccgttggggccgggttggggtaggcggaggatcgggggtcctggactgggccatctgactccaagctgctctcctgcaggctccctcagctcccgcttctccgaaccatctgtggaccagggccccggggcaggcatccccagtgccctggttctcatcagcattgtgtgagtaagagacaggagcagtggccacacaggcctgaacctgcctcctggctgtgtgaccttgggcaagtgtgtggcctctttgagctctctgcttaagtgggagcgtgggtttgctcacagcaaggattagacaaggcaatgtttgggatgtgccggtttgtcatggagaagccttccctgctagaacagcagagccggggggggctatgggagatcagaggggcctgacctcacccaaggatcaaggggggctttctggaggagcaggcacacaaagattctggaattaggtgcacagggagaggtgtgcctaacaagtgaggtcatttatggacattatgttctctgtgcccactcctaagctgggcgatgctgaggacaccgcagtgaccttgaggaaaagatagacctcacaccagaccagagtgatccgggctgggatgggggaggtatgggcagaggggttggggctgggagtggggaagccctgggaggccagcggcggcttcctcccaggccagagggggcagtcaggatgggcgtcctgagagagtggagaccgcgtaggctaagggcttgggcagggagaacccacactcctgcccagaagcctgcaggagttggcgggcaggacgctgggaggaaacagaagcaggatcccggggttgagcagaccctgcgaggtgagggtcaggccagctacatgctcagcctctgagcctcagctctcagctctcatccagtgagggggcgtggtgctctcagccaagagctgccccgggtgaggagggctgggggtgtcgggggcaggccaggcggcgctcatctctctgtctcccctcactgctgctgctgcaggatctgtgtgaggtagggtcccgagtcctccccctgccctcccctccctgcaccccacccctgctgcagcctcttctccccaccccatgccccccagctcccccagggaggtggcctggcatggcagtcaagggtatgggcatcagacagacctgggtttgaacactgacttccctgctatggactgtgcaaccctaggcatgtctctcatcctctctgagcctaattctcctcctctgcaatgggggatagaggtgtccctacaagatgtagttgtttgggggtgttcagagcatctagaccccaggaatcctgacctctgacccctgtccccagccttatcatcctcatcgccctcaacgtcctgctcttctaccgcctctggtccctggaaaggacagcccacacctttgagtcctggcacagcctggccctggccaaggggtgagtgggtagcctggggaaatgggggggcttgggcacatcgggggaggccaaggccctgctcaggcctggcatccccacagcaagttcccccagacggccacagagtgggccgagatcctggcgctgcagaagcaattccacagcgtggaggtgcacaagtggaggcagatcctgcgggcctccgtggagctcctggatgaggtaggaggcgccgctcgggcagggctcggggctgcggggctgcagggtcctgtgttgaaaccccaccgtgcggcaggcacttcccctctccggatctcagtgtcctcctctgtaaaatgaggaagccgctcagagtccccaccccacagcattgcaggggaaagcatggaagcatggatggaagacagaactgattggctcacgtcctggagaaaagtccagaggcgtctcacattaggcacggccgggtttggtcactcaatggcagtaagagtcagtctctcgtgcccactctgccctgtgcccatctccagggttggcttcattggaggccacccttttccccccacaggggaccacggagcttactctcattggctgctggggtcccaggcctacccctgacacatcacaacagccagggcaggccacgtgtggtccctctacccgctaccccactctggggtaactaaggggtcacatggtctgaaggggagagactctccaaaggacctgaggtctcatctccaaaacggagtggacccagacacccagtgtagttcagggacaatgtctactcagacaaccaggttccaattccggtgtgtgacctcgtgcaagtgattttgccatggtggccgtggactcctctgtgcacaggataatgactgatgctacctcaaagactgttgtgaggatgagacaagttgacattgggagtggtgccaggcctgcaggaaacactggatgtgggctggctgtcctgagtttgagcctagtgccagggacaaagcagatgcccaataaatgtgatgtcatcacacgacaattccctcaggccccagtagactcaggccagcagttgcggtgggtcagagcaagtgtcaggccagcagttgcggtgggtcagagcaagtgtcaggccagcagttgtggtgggtcagagcaagtgttaggcactcggggaaggtgtcgagggggaaagcggatgggaaacagagtctggcattgcctgcatttccaaggccatcagagctgaagttgtgggtgacggtgaaaatcttgtctcattggacccttccatatcagaaggctcatctttaggggtctcattgccccccgaaatcaagcttgggagaggctcacactggaaagggcggggcaggatggggtggggaggagatgaaggctgaggccccatcactcatagagagggtaggcagggccccccatcctgcgttattttattttattcttttgagacaggatctcattctgttgcccaggctggagtgcagtggcacgatcatggctcatcgctgcctcgaactcctgactcaagtgatcctcctgcctcagcatcctgagtagctgggactataggcaggcaccaccacacctggccaattttaaaattttttgtagagaccagagtctcaccatgttgcccaggctggtctcaaactcctggcctcaggcaatcctcccgcctcggcctcccaaagtcctgggattgcaggtgtgatccaccacgcctggccctgagttaaatttttatcattttcctctctgtcaaactgctaagggtgcagagttgacgtcacagattggtgctcacagtagatgtagactgagcacttacctgcagctgggctgttctaggttttaagcatgactgctttatccccacagccagcctttgagaagatgctcttgttatcccagtttttttgagacagtctcgatctgtcacccaggctggcgtgcagtggtgcgacctctgccttccaggttaaagcgattctcgtgcctcagcttcccaggtagctgggattacaggcacccgccaccacgcctggctaatttttgtatttttagtagagacgggctttcaccatgttggccaggctggtcttgaactcctgaccttaagtgatccaccggtctcagcctcccaaagtgctgagattacacgcatgaggcactgtgcccggccgttatcccggttttatacataggtaggcgatatgaggcatccagaggttcgaggagctcaggagcttgcccgaggtcacagagtgggtaatggtgacagctaacatgtgctgagcacttagtgtacaccaggttctcagtgctcttcagaaccctgaaataatcctgtggagcagatgtgttatagacccgtatttcaaatgaggggattttggctcagggtggttacgggacttgcctgaggttaactgaggtaacaagcagcagagccaggatttgaacctaggccatcggggtcacaggcacacactaagccccttcctctgctgcctctgagaagttaaactgggtgcagcatggctgtgctcttttcaccaagggaccctggggtggggcagtatggcctctagaccgtcctcagtttctcaatggcaaggtgggggtgggcgacatcaccccccagcctccagcgttcacccccgaccctgctcacctcctccccgcagatgaagttctcgctggagaagctgcaccaaggcatcacagtctcagaccctccctttgacacccagccccggcccgatgacagcttttcctgaggaccccggccacgcagctgttcccccacatggacagatggacacacagagcctcggcggccactgctggcacggtgtgagcgccaggcatctcccacccgcccctcccgacggcccaaccaggggctgtgcagacgtggggaccacggaaccgagatgcactttagaccagggagctggcccggcctctggcaggccccccactaacttattttgcccggctgaggttgtggggggcgcctcctggggtgcacgattccctcagctctgggtttaatgtattatatttatttggggccgacagtgccccaataaagggtcagaagtggctgtggctgtgcctgtggggccctgggagtgggtgggagcctcctgttgcactcagatcctgccatggtggggaggggacctctgtctgtgttctggggccatagtcactgaaacgatctggaattcccgcagcatcttacacaagctttacatcatctgaggtcaacgcaggaactccggggacagaccgtggtagctggagttcaaatcctgcttcctagcagtggtgtaaatgcagcaggtcagccccctggagctccagtgagctttcctgtgcaatgggtagaatggcagtagctgtctctcagggttgttagaaggcagtggttctcaaacttgagctgcattcgaatctcctggagagcttgatgaaaaacagactgtgggcccctccctccaaatttctggttcagtaggtctggggcagggctgggattctgcctttataacgagttcccaggagttgctcatggtgccatcccagacgacactttggttttttgtttgtttgttttaagttagggtctctgtcgcccaggctggagtgcagtggcacaaacatggctcacagcagcttcgacctcctgtgctcaagccatcctcccacctcagccttctgagtagcttggactacaggtgtaagccaccacgcccggctaattttttatttctttttggagatgggatctcactgtgttgcccaggccagtcttgaactcctggcctcaagcgatcctcccgcctcagcttcccaaagtgttgagatttcaggcgtgagccaccacgcccagccccagaccacactttgagaaccactattataggttcaaggagttcataaatgtggctacttataacagggcccggcacagatggaatggagtaagtattcaataaatgttacacttattgcataaaaatagagggaaaaaagtaactcgcgtagtgagtaccaagtacgtacgtacccagctctgtgccaagatctgatgttcattttattctcacagtgattccatgaggtggagacaaagatgtacacgcccgaggctacccagcagggaggcagactccaggcctgacccctggggtctccacatttacatgcaaggtcctaaccccctcaggaccccaccacagcccattcaggctgacgttggttggattcctgttttacagatgaggaaatgagcttggaggcaaagtccctggtccagaaagaacccaggtccacctcacgcaaaccttgtcctggttccagagggagtatgtggggtagagacacctttggcatgtcacacccccggctataagaatcatcctaactgatggcttggagcaggggactggaggagggtttggagagtggatcaggagtggcataggaggcagagccagcctctcctatcctctagttgtgtgatcatggcaaggtacccatgctgagcctcagtcttctatatctgtaatatgggtgtaataataataccacctataggaaaaattaaatgagctaatgttagtaaagtgcttagaatgcttagaacagcaccaagcccatacatagtaggtgctcactgaacatagcttatagggccgtgaggtgcctcctgtccagtgctgaggcctgtcctcactgtgccttcacctaccatcccccaccagtggaagggcccggaacagcaagagggttattctctgcaggggaatttcacagctcagaaggtgctggcgtaaaagtctagaccacagaggtgtcggatgtccctggctccctgcccctctgccatggtcctgccccacaccctggctcctcttgcctggcagggctgggccagggggattctgagaccttaccccacccggaattggaggctaggatctgggtagtgacccttcagccgagagtctcactcccaccctggtcctgacagcccagaactcccatctccattctctcaatttggcagaacctactggtaggacaggccactcaccactgctggggcaggattccacatccatcctaggccagctacatgactctgggcaggggcacggccctctcccagcctcagtttcttcatctgtaaaatggggataatagaacttgctgaaggtttggggcagtagaagtgggttctgcaaatcccaaggacttagtgaacattggcattcatttatttgtttgacaaatattgattgagtacctacaatgtgccaggaacagttcaaggtgcaagagacacaagacaatatcctcacctgggagattttttttttttttttttttttttttttttacatggagtctcactctgtcaccaggctggagtgcagtggtgtgatctcggctcattgccacctctgcctcccgggttcaagcgattctcctgcctcagcctcctgagtagctgggactacaggcatgtgcccccacgcccagctaatttttgtatttttagtagagatggggtttcaccatgttggccaggatggtctcgatctcttgacctcgtgatccgcccacctcggcctcccagaatgctggaattacaagcgtgagccactgcgcccggcctttttttttgagacggagtttcgctcttgttgcccaggctggagtgcagtgatgcgatcttggctcactgcaacctctgcctcccgggttcaagcgattcttcctcagcctcccaagtaactgggattacaggtgcccaccaccactcccagctaattttttttgtattgttagtagagacggggtttcaccatgctcgtcaggctggtctcgaactcctgtcctcaggtgatctgccccccttggcctcccaaagtgctgggatagcggggggcggctcacatctgtaatcccagcatggtcaacatggtgaaaccctgtctctactaaaaaataaaaaaattagccaggcatgatggtgcacacctgtactcccagctacttgggaggttgcggcaggataatcgcttgaacccgggaggcggaggttgcagtgagacgagatcagccactgcactccagcctgggcaacagagccagaccctatctcaaaaaaaaaaaaaaaaaaaaaaaaaaaaaaagaacataatgtcaggtagtgaggctgctgtggaaaacactcaacaagaggtaaagagtaaaggaggtcaggttaggagcggggaaggcagtttaccctgaagggacacagaagacctgacgaaggtgacattggagccatggaggcccacggagaggggcggggcagggggggagagccggggcagaggggagagctggggccaaggccctgaggcaggaacgggttccctgtgttgggaacagcaggagggcctgaacagccagagtggagtgggaggaaagaggggtagaaggtgacatcagggacataaatgggtgcaggggatcacgaaggggtcctcctcctgaaacagcacctccagattcccggggctgcttctctccagggtgccccgcctgcttgggtgaggtccggattgtagctgtagtcctagcctgacggccccccaccctcctctaatgcctacttggggtccctgcacattgacccccaggcctggatatcagggctcaggggagataacttggaggttcgccctctggaactcctgaggatgacctccatcatttgaagtcggaaacccggcccccaaactgcgctctaagtcctcctgtgactctgggggtgacctttccagactccctgggaaggtgggggggggggggtggtcctcagagccccagcggggtcggagacacacagaccaccctccccgttcccagaagtcgcggtccctgcgccacccggagaggccggtgcagcgggcgcctcccgggccgctgcggcaaaggctgggcggccgcgccttccccccgcggtgattcatcccgccccctccctctcctccctcgtccctccctaggccgccgccgccgccgccgccgccgccgctgcagtgcgcaggagaccgcggtccgcgcccgagcgcgcccgagccggagcgggaccggggtcggtgcacctagcggatgtgcccggctgcgcgcgccagcgcagcagcccgagcagcggccgccgcccgcgcggcggggatgcccggacgccgggccccggggctgggcccccggcggtaaccggagcgggggggccgcgccccccctcctcccccctcgccggtcccagagccgcagctgctgcgcccgcgcgctcccggggacattctaaccgccgccaggtcccgccgcctctcgccccgctattaataccggcggcccgggaggggggcgcagcacgcgccgcgcagccatggggaggctgctggccttagtggtcggcgcggcactgggtgagtgcgcggggggcgcgcgcggccggggggcaccgcgggggcactggcggggcggcgggagtggcgctcgggacacggggcagccgcgcgagggccacccccggcccatccccgggccccgccaagtcagcttcagaagttgtgcgcgcgggagccgggcttggggagggcagtggaggtgagggtgggctccagcgggtgggggccgggctggcacagcctggcggctgcaggcgcccagccgggggcgaggaaacgcggagtcagctgctcccggagccccgcaggctgcaatgtgacacccacagccgcgggaggggggtggggggaaggcggcgcccggagactgggacgggaaagacggagggacagggagagatgaagacgggaggaagggggcgagagacagagaaggactcggagcgcaccggagtggtccgctgggatgctggggacatgggggtcaagggggagacggagacagagagaggggtattggagagagagagagagagagagagttaagagactgagcgcgatggagaaagggaaacttgagaaaggcagaaggagatggagagaagagagagggagatgcgggtgcccgtgaacaccgggagagaatcttgcatggagtttgaaaagggatagacgtagaaaggtggaaagagattaggagaggtctccttctgagcccagagagtggacaaaaagtggagggaccttcagagagacccctgagagggacaaagataggagggactgagacagaggccctcagggagtctgaaagggaccgcaggggaggcggatggatgagaagtcctgaggatcaggaaacaaggacagcacagggctgcagcagaagagacacagcgttagctacagagtgctgggaggcagaaaggaggtgccaggtaagagtgtgaaggaattctaagactggaattcagtgggctgcaaaagccctggggcaggagagagctcaggaaagctttgagtagtggatggggttggggtgggaagagctctagaggcgaggagcctggggaagaggggatgatggaggcaggagaggccggggaggggatggctcacacaggggcttgtgggctgtggagaggggctgagtgtgggtcagccccggtttcagtgcccacctccccacaatcccccacccccagaccttttctcccaacccatttctcctggagctagctggttttacaatttaatggtgaaaatgactgccaccttaaacttctaacttagctggaattctcattctaccacctagatgcttgggttcctccagcaagggactttctgaggaaggggcactcgggtagcataaagtctgagttaccggcaacgttgacagtcccacttatggggcctcccatgtacaaggccctacctaatgtatgaaaatgggcccagccattgctggaagcaaaggaccatttctttcaacaagagagagggaaactgagactcagggatgaatgacttgctgaggtcacgcagtgagtgacagggctcagcctagcatccagtcctgtctgctggtaatcattgaggggggaacagatggtttgtgaggggtctggcattgcttagggcaatgggtgcctctgcctgacctgagcctgctgtccccacagtgtcctcagcctgcgggggctgcgtggaggtggactcggagaccgaggccgtgtatgggatgaccttcaaaattctttgcatctcctgcaagcgccgcagcgagaccaacgctgagaccttcaccgagtggaccttccgccagaagggcactgaggagtttgtcaaggtgtgcgggtgccgggaacgggcatgggagggcaggggtccacgagtgggaggcggtggggctggatctcagggagggggcttatttgtttaataatatgctgtgattgctgacctggattcagattctggctccaccagtggccagctggtgaccttggccaagtcagtgagcctctctgaaagtcagtttcctcctcggtaaagacggggtggcggtggtctctagcccataggtttgtgtgaggactgaatgcattgacgcacctggcacacggttggcatgaaataaatgtcagtggacttatttggcaccagcaaacaatgtctctgatagtcattacggagggaagacagaactgttttttttaacctcctttaaactatgtgtgtattttgcattatatatcggtgagggaaccataaaattctgtgacgtgctggagagttggggtctccagctgctggaatcaggctgccctgtctctgctggaggagtgtgtctggtggctgggaaagaacggcagagaatgatagcctagaggccagatggggcttgggaggatgactgaggaacgtgtgtgtgctcgtgtgcatcttggctagaggcaaaagcggggtctggttgactccaggcgtgatcctagccccccacccctgtgccctccctgcctgaggtcaaggtgtctgagcccatctgtgtgccatctgtgtttgtgggtgtcagggcaggggacagaatcagggtcaggtaagggaagagaggcccaggcagtgacaccttcccctccctggctacccctagatcctgcgctatgagaatgaggtgttgcagctggaggaggatgagcgcttcgagggccgcgtggtgtggaatggcagccggggcaccaaagacctgcaggatctgtctatcttcatcaccaatgtcacctacaaccactcgggcgactacgagtgccacgtctaccgcctgctcttcttcgaaaactacgagcacaacaccagcgtcgtcaagaagatccacattgaggtagtggacaaaggtgagtcgggtgctgcctgcccctttaccgtcacccaccggagagccagatggagggacagatggcaggcagtggacaggacaggctggctctgtgcctggccagccaaccgcccacagcagcgggctgagggggaggggagcagcccctcctgcccactccagctctggcctctgtttctctccagcccacggagaggtcaaagcatgcctgtcccccacagacgctccgggtacagaacccagctctgtcacctgtgctgtatgacctctggcaggtgccttctgtctctgagccaaagggttgtcctgggcttgcccgggataataatccgatgtgtttctcggggtgtggtttgagccattcttccatcatggggttcatgaggattgagcagctgcaggcacacgcctggcttccagcagagccttgcaggtggtggcgagggtggcggttcttactgttcgagtagctcagccctgctgccctctgtggtgatgaggcaagagagcgtgccacctagagcagagttccgcacacccctctgcactcctgccccgggggagccgcgctggcctgcagtctcactcaacacctctggggcgggcctaggggtcctttctaaagctctcaggtgaggcagtgaagggccacaggtgcggggcccaccctctgagcagcaagggcctacagcgcttttgaacgtctcatcattttgcctcagccaccctggaccccttttctgagggaggtccgccccttctctgatccatcttctgctcagcatcaattgcaattgtccagcgccctgtggccactggcttagagttggggaaacagcccaggccttgaagcagctacaagccgtggcagaaaggtctctcagggccacggcacacacatcctcatgggcaacacgcactgcccatcttttctgtgagatgggtgccggcctcagtgccttacacggagtcccttagtgaatcctctccccaccctctggggtaggggctcttcctatccccattttacggatgagaaaaccaaggctcagggagggaaggttatgtggccaaggtcatgtgattgggagctggacttgaatccagaggagcttgggtgactgtgtttctgttcttggcatgattcactgtactctgtgatcagccagagcctgtgggtttctttttataattagcatttttacgtttattgtcaaattggtgtagcagaatgcaattcagcaggcatgtctgagccactctggtgtttgtcacgatgctggggggtgggggtcacccgcagacatggatgatggagccccgcctgcggagttgctgtgacaaagatgcctgcggtactgggactttacaaaacctgtgttattgctcttgcaaatctgcagaggtgagatggggagagggtgggaggctccagggcactgttcagccacccaggttctttccatcttgttgtttggcagttggccagggtgttgtgtcctctgtacgccgtgacccaatagagcctctttttttttttttttaaatttagatttttattttttgagacggagttttgctattattgcccaggctggagtgcaatggcgtgatctcggcccactgcaacctctgcctcccaggttcaagtgattctcctgcttcagcctcccgagtagctgggattacaggcatgtgccaccaagcccagctaatttttgtatttttagtagatatggagtttccccacattggccaggctggtctcgaactcctgaccttaggtaatgatccacctgccttggcctcccaaggtgctgggattacaggtgtgagccactgcgcctggcctgagcctctcttttttaggattgcccactgtatgacactacatcccacagcctgtgctattaccagcatttaccatcatatgcagttccttatgttggccctgcagagtttgtgttttctgcactatccacccagttctagtgttttttacccaccatatgtagtattgccttttaaacattacccactatattatagtattttatattacccactataggatattttatattacacaatatattttactatcataatattgccaaacacaacagttttttgttttttgttaaagagaccaagtcttgctctgttgcccaggctgggatactgtggcgtgatcatagcccactgcagcctcgaactcccgaaatccagcgatccttctgcttgagcctcccacgtagctgggactacaggtgtgagccactacgcccggcaattttttttttttttgtagagactggatcttgctatgttgcccaggatggtcttgaactcctggcctcaaataatcttccctccttagccgccgtaagtgccgagattacaggagagagcctccgcgcctggcctacagtatttttattataatccatcatactagcgtatttttaacgttccccaccatggcgggtatttttattacccaccatgctatgctatagtatttcaaaaattaatcctattgtagcatgtaaaaatattccattctataccatactatattcatcattacctctgatactacagtatttttaacatgactcattgtgctattgtattttttcattacccacaataccacaatattactgtatttgttagcactgcctgccattccttattattattatttttgcaatggagtctcgctctgtcacccaggcaggctggagtgcagcagtacaatgtcggctcactgcacctcccgggctcaagcgattcttctgcctcagcctcccaagtaggtgggattacaggtgcacgccaccatgcccaactaatttttgtacttgtagtacagacggggttttaccatgttggccaggctggtctcgaactcctgacctcaggtgatccacccacctcagcctcccaaagtgctgtgattacaggcgtaagttaccatgcccagcctattattattattattattattattattattatttcaagttagagtctcactctgtcacccaggctggagtgcagtggcacgatcttggctcactgcagcctccatccacctcccgggttcaagcgattctcctgcctcagcctccgaagtagctgggattacaggcacgcgccaccacgcccggctaattcttttgtatttttagtagagacagggtttcgctatgtagaccaggctggtctcgcactcctggcctccagtgattcacccaccttggcctcccagagtgctggaatgacacgtatgagccaccacactgacctttttattatttttatccaccatctcgctgcaatttcagtattgcccatcgacctatattgcctcctggtaatgacccctgaggaatgagccatgccatttccataggtggaggcgacgggtcatggtggtgagaacttcactgacctggaagaggtggagaagatgctgggaagctgctgagggctgcccacctgtgttaggagaaggcagatggggacccatggggacagtaatactattttggatccacacaacgggagtggaaaatgccttgaggcacagcagcgtctgaggcgggtgagaaatccggcctgcagagtcgcggctggccttcagatctgcgggctgcctgtgagatgccgtgttacctaaatccatttgggcactgagttccaggagtgggggcaagaattccgatgacggggctttatccggtgcgcatccagctcagagtggttcctgagaccagccaccatgggcagccaggatgtgctcatccttgaggctttccgaggcatcaaggagatggttggataaagaatttagcacagagcttgactgatggcaggcgcccacaacatgagacacattaataatgtgtgtggaggccaggtgtagtggttcatgcctgtcaccccagcactttgggaggcagaggtgggaagatttcttgaggccaggaattcaagaccagcctgggcaacacagcgagacctcatctctaccaaaaaaaaaaaaaaaaaaggaaaaaattcacctggcctagtggtgcacacttgtagtctccgctactcaggaggctgaggcaggaggattgcttgagctcaggagttccaggctgcagtgggctatgattgcatcactgcactccagtctgggcaatagagcaagaccctgtctcttaaaaaaataaagtctgttgaaaagaatgaatgaaggaaggaaggaatgagagggaaaccctgtctcagctcctcccgcagggaagctggggcagggcaggcagggggggcatccggccccgctccctcccttactctggcccagaaagcactggtgccatctgcacagggtggagccaaagaaagtgccccactcacagcagagggaggccatttgaggacagcagggaaaatgggatctcagccatctaggagggggccagagatgtgggatggacacctaggaaatccagccgaggacaccagagtggcttttgactctggtcccctggctgaacgcgttccctttacagtttaaatttaggctcaaggagaagaagctggcaatcggcagggccagtgctgtagagaggatgtagggtttccggaaaatagccaacacttcagcagtgctggctgcgagctcatccaagcatgttacgggtgttaactcatttcctctccagcaaccctgtgagagggtctgagtgttcccatctccattttacagaggctcagagaggtgcagtcctttgcctgaggtcacacagctagtaagaggcagagccgggatttgaaccctggcagtctggccctagagccccagctgttaaccattaggctttatagccccagttataacaacaataataatactaatacaagtgaaccttcactgagtgccatttatagatcaagcactattctaaggattttaaagcatatttaattctcacagcactctgatgaaggaggtattcattttacaattgaagaaacagaggcctagagacattgagtcacttgcgcaaggtcacacagctggccagtggcagagccagcctttgaacctgagccttctggttgcagagctacggcttttaggcaccgtgctgagggcctccagaatgacacagatgtggcctcgagttacacagggaggcaggttgagggtgacccccaccaggcctacccaaggctgggtattaataatcacagtgcatacaccaggcccagggaggttgagccactcatccaagctcacacagcaagctcacagcacactcaggctgtcatgcagcctgggctacccccttaaccctgcctggcccctgcagccaacagagacatggcatccatcgtgtctgagatcatgatgtatgtgctcattgtggtgttgaccatatggctcgtggcagagatgatttactgctacaagaagatcgctgccgccacggagactgctgcacaggagaatgcgtgagtagggtggctgggaggtgggagggcacccagggcaccgtcacacttgccagagaggaactccggagcccgggcagggaggaggcagcggagcggcccagggcgccatctctcagtactacccagaggggagtgctccctgtcagacacaggataggggtcgtcagacccagccccttcctccctccaactcaggagcccaggctcccagccagattcctcaaagaccctgaggagtccacccatagactccttctctctctaactaaggagccctgtgtacctggggtggagaccgctaccttcccccatcccccgggggttgggtcggtctgatgatggggtcactgtatacctggcctttcccccacagctcggaatacctggccatcacctctgaaagcaaagagaactgcacgggcgtccaggtggccgaatagccctggtaaggcggatgggctggcagaggggaaggggattgggaggggccgaagtcccccaggtccctaattccccctctcttgctccccttcaggccctgggccccgcctcaaggaagagccagccgtaatggggactctccaggcaccgcctgcccccagcgtgggggtggccactcctgggccccagaaagcctcagagtcctgccgacggagccactggggtgggagggggcagggggcttggctcgcacccccactttcgcctcctccagctcctgccccgccggccgcgcaccgccatgcatgatgggtaaagcaatactgccgctgcccccaccctgcttctgctgcctgtttggggaggggggcggtgaggtgggggcagcggccccgcacccctcctccttgctgatttgcacacattggccgcttcagacacgcacttctggggccagcccctccccgcctcctccctgcctggcggcaggggtcgcgatgatgggctggagcagtttggggcagggggttctgggacccactccgactccccctccccggcatcatttcccctcccgcttcctccggctggacctggggtcccccctccctgtaatgcactcctgccccggcccaacctcgccctctctcaccagccttgaactgtggccacctagaaaggggcccattcagcctcgtctctttacagaagtagttttgttcatgaaataaagactcttggacttgatgcatagtttcgattgtgagccccgtcaccttccccccattcccgtccccgaatcttcgagcccgctttccagggaccctacctgagggcccacaggtgaagccacttagtgcctgatctgtgtcggggttgggggagccatgggctcaggggtgagggagagtggaacggagccaggaagggagggggtgccgtggagggaagagaatcgaggctgatgctggggtgcaggggtggcatggggtgtgtggtgtgcccagcagtgtgagtctctggagaggtgggcgctggggagaaggagagggaaggagagacgggtatggatggaaaggcagaggaagccaggctaaaccagcgtgtcccaatgaggggccctgggctgagtggaggaaatgggtgcggtggaggtgggtttggctgggcacagcgggcacgtgtgggtaagcgggtggggccggttgtgcgggtggcctatctggggcaagcagccgaggccgactgtgtccggcgtgtggttgagcacgggcaggtgtctggcggtgaccctgcacgtctggtgtttacctggccctgggtctgacgtgggccgcgcctggctgctggcgggacagtgtgttatctgcctgcggacgcttccggccacttggcctgggcctctgcccttagcgctgtgttttcccggccaagccccccatcccccctatctagtgctaggactttctggctccagaggtcaccgcggccgggcggaggctgccaaagcaaaccagccccgtgacttgtaggaagccagcgggggaggggccggggcaggatgagcagggcaggcgggagaggctggggctggggttggggcccaggaattgggcagggaattaggcagaggtgcagcaagtggcgggcacagccaggacctggggctggaggacgcagaaagggcggggggaagggttcgctgggtgagggtggagtgggcttagggcagctggggccctccatctgatctcttctggtcagacccccacccttcagcctgcactttctccctaaacccccagcctccggccaggcctgtccctgttcccacatccccgcagacaggcacacctgggtccccctggaggtccaaggcaagccccgtagctgggcccgcctggtccagcccccacaagcccggccccatcagccaggtggcctccagtgctgccaatcgaatggtccggcccctccccgccccttcacccgcccctcgcccagccccctcctcctcaggtgaggcagcctggcctagcaggccccacgccaccgcctctgcctccaggccgcccgctgctgcggggccaccatgctcctgcccaggcctggagactgacccgaccccggcactacctcgaggctccgcccccacctgctggaccccagggtaaggacaagggcccccagactcacagttccagccctgaggacaggggttccctcatccccccacccagcctaatgcccacctcctaatagaggggttcctggggacctgaagagggggcactatgacgtccccccaagcacctaggtgttctgtcctgctcttccttcagactcagccgttggaccccagtcctttcctccccagacccaggagttccagccctcaggcccctcctccctcatactagggagtcctggcccccaaattcctcctttcccaagacttatgatttcaggtcctcagctgtctcctccctcaaaccgggatcctcagtcccctgctccaccaggctcaggcatgggggtccccatccctgcaaatccaggcgtccccccgctgctggtcagacactgaccccatccttgaacccagcccaatctgcgtccgtgatcacggcgtgctctggccaaggcccagtccctacagcctgcctggatggacgcctgggactgggggcgccaggactgggctgggctgggctcccccaggccctgcctccccgtccatctcctcacaggtcccaccctggcccaggaggtcagccagggaatcattaacaagaggcagtgacatggcgcagaaggagggtgagtccccttccctgagccccagctttggctctgcctggcgccccgccctctgtgctcttttctctaccctctactcttcggagccccctctctctgggcacccctcccagatgcatccccacccctgttagtcctcctccacctgattaactattaaccacattttctgtgcagctgtgccaccaccagcctcccttctaccctatgtgaccttcctggcgtgctgcctcagtttcccctcatcccccagtgatttctcagctaactctggacttgtcctctgctggggctgaggcggggaagctgtagctgtcatggttaaggacacagatttggagtgaaacacacaggcttgcatttgaatttgctcttgccatcttttttgctgtgtgatctggtgcaagtgacattattcttagggctttggtctccctctgggtcaagcatggataccagtcctccctctgtgaggttgctgagtgcatgacacacaccaggcactggtctggggctctgcatataagacgcatgccatcaagcagagctgtcatgacagaggttggcaaactcggagtcccagagacccaggacccccaccgatcccagacattcctccacctcctggctctgtgggcaaaagagcagagggaggactttggactgggcctggatggatggagaggggagagacggcagagaaaccaccataaggatgagagagagagactgcgtcatggagttgctggcccttgggagtctctgggcagcccccagctagcctggcttcctttctacctctcacacatgggacccagctggaggggcgcatggaggggcgtcctgttctttctgccttcccctagctggggctgactccctctcttcttccgcaaccaggatagccgggctcagtcctgggcagtagcactttctagctgtgtggccctgggcagacggcgtgttctccctgggcctccattctctcatctgtgaaatggagagggtgacagtgcatgtccaacagcgtggggcgaggcctgaaatgccaggatgggcaggaagcactgagcgtgttggctgaaatgattagttcagatctctggcctcctcgggtctcggcacagctggcaattcagaccccaaaccaatcagctgcagtccagagggaacccaggctcccagttactcaggagaaggcattgcaccctagccgagcaggtggatgacagaatccagctccttggggacaatctctttcctggagctgccggaaggacagccccagggcttgggcccatgggtgaatgagccagggaagaaaagcagaaaatgcccgaatggacagagatggcctgggtacaaagagaaacagacacaaagtgggctctggtgcctccctggcagctccgggctggtcttggaggggagtcctgctgtcagggctaggggtgtggaggtcgaacctggacacagatgctgaagggttccgattctgcacttacttgccgggtgacccgggtttggtggctgccggactttgggcctccttttctcatctgtaaactgggggtgatggcaatggcgccttcctcgtgaacagctgcaaggatttaagtaaggatgctgtgcaggactggacggggttagggtagggcggtgcgtccgtgtgtgattcagagagccgttgtggctgcagcggctgctgttgttggtgtcactgttattgctgctggcttcttggtgctgcctggaaacttggaattggaggaggtgatactggagttgcaattccaaggatgccaggcagagggaagagcaaggctcttgctcttctctgggaagctgggaggtgacacagcactggtgtgcacgtagccaattgtggtatttctggaggtgaagctggaagttgagctgggtgggagaagaggtgtgcaagctggaccaggcaggggtgggactgttttggggaagagctggccaattccttgcagtaccaggtctctccacaaggtggcgccagtggttagtccctgcttctcttgtctaacttgtattttacaagttctactgtttgggttgctttttggaagctctctctggtacctgatagtgacccacatggttgtctgagaattgggggaaacatactcccaaatctctgaaagccatgcttataccctagtggggctggaaatgccaggctgagggacttaagctgtctggggggtactagggagtcacagagggttctataggtaaagaggggacaggttggatttggtgtctcagtaggttccccaagcctccgtgtggagggtgcgctagaagggagactgagcccagcggttggatggggccggagcaaggtgcagatggagagaaagaaggaaacgggggaaggagagtcactcaggaggattggcaggctgtcgggggaggggaatgttatgcagatggggatggtcctaggagtgagggcctctgagacaggaccgggaggaagaatatacttggggagacattggggagacattctgggacctggtaggggcaaagggactaggaggtcccagggaaaggtatttaaaaggtatttaaaggactgcaggagccctgacctgggacctggaagagggtctagggctggggacagaggggaaactgagtccacagaggtgggtgagacagacttaggggcaaggaggagcagggggaggctgcggccagccctacaaactctggattttacggagtaggtagagggtgggtgaagacagcagcctcagaggcgggaaggaaaatcaggtgcgcctggtgtcccagaagtccaaagaggagagcatttatacaggaagctgcagtcatgtaagatgaggcccgagacacggagccaccagttgagtggattttcagagccagagagccaaaggtgttacgcgtgggggtctttgcagccaaatggtggaggcggaagaactgacctatgagaagacccaaggcatccagaggggcctggagaagcaggggcagagagtctcagggagatgtaggggtgggggaggtctggcttaccaagggaaatagccctgctgctgggatcaaagaattgatgttgacgtgccgcctgtcccagtagagacacgcagggaggatgaggatgcgtcccacaccctgggccagatgaggatgctgcctgtcccagtagagacacgcagggaggatgaggatgcgtcccacaccgtgggccagatgaggatgctgcctgtcccagtagagacatgcagggaggatgcctctcatactgggggaaccccaggatgcagatgcttcctgtcccactggaggcgctgaagtcctctgaaccacacagcatggaaggaggttcttcctctcaccctaggagacacatacatagtggcattgcttcctgtcccaccagatgtgccaaggcctctaggctgcattctgcatggcctagagccctggcaggcacagctgaaaacaaagcaagcaagaccagcccagtggctgtcgggagccaagacctcctgctggaacctggagagtggtcctgggcagagttggggggcaggcctgagaacccctcgcaggacaggcaggggtcagccggcagtagttgggctggtctggcccactggggcctcttttggggaagagagtgtttcctcatgccttgatgggagccactgagctttcaatttttttttttttttaatacagagtctcgctctgttgcccaggctagagtacagtggcgcaatcttgattcactgcaacctccacctcccgggttcaagcgattctcctgcctcagcttcccgagtagctgggactataggcgcccgccaccacacccagctaatttttgtatttttagtagaggcggggtttcaccatgttggccaggctggtcttgagctcctgacctcaagtgatccacctgcctcagcctcccaaaggaccgggattacaggcatgagccaccatgcccagcctgagctctcaaattcttaagacacccagataatggccacaccaggaaggtcctagaccactccctgctctgttccaggtgctggcctggtgccgggttcaccagccacatcaccatgggtgcagatgggcgagctgggagctcctgccaccttggggtgctttgcggctgccaagggcagttgaacccaagccaggcccagctgaaggctttcagcagcctttactctttggccttcttataatccctagtgaaggggttggcttttatttatttatgtatttatttatttatttattttttgagacagagtctcgctctgtcgcccaagctgaagtgcagtggcgcgatctcggctcactgcaagctctgcctcccgggttcaagccattctcctgcctcagcctcccgagtagctgggattacaggtgcctgccactgcgcccggctaattttttgtattcttagtagagacggggtttcaccg[138 bp omitted]ataaaatcccttttcctgtgccaccaggcctccccagctggccccagccttggttcccactaccttccccaagctctggccatctggccatctcgatggcctctccagcctctgacataagagagcctgcttattcttgcctcaaggcctttgcctgtgctgttccctctgcccacagtgcccttccttgtggtctgtgtgtggctggcacctcacctttcagagcttagctcagaagtctcctctaggggaggccctgtgatccctgatcccctgcagaagcccacctgctgccccagcctgcacggttttcttcacagcctctgccacaatctggaaattattgggttcatttacttgtttccttgttaatgtctcccactccccacctacacgcatgagaacgtgaacccctgagagtcgtaaccttatctgtcttctttgggttatgttcccggaacctagaaaggtgccaggcacacagcggatgttcagtaggatggtaaacaaataaagcttctttaggctgatgaaaaaactgagggtcaggcgcggtggctcacgcctgcaattccaacactttgtttgggaggctgagacaagcagataacttgagtctgggagttcacgaccagcctggtcaacatggcaaaccccgtcaatacaaaaaatacaaaaattagccatgtgtggtggtgtgcgcctataatcccagctactcgggaggctcagaattacctgagcctgagcgcttgagactgcagtgtgccatgatcgcgccgctgcactccagcctgggcagcacagtgaaaccctgtctcaaaaaaaaaaaaaagaaaaagaaagagagagagagagaaaaagaaagaaagaaagaaagaaagaaagaaagaaagaaagaaagaaagaaagaaaaggaaggaaggaaggaaaagaaaaaaactgaggctgaggctcagagaggggaggggagttgctcaggcccacacatctctgatgatttataaagcatttatagagaacttgctatgtgccaggcacttccgcacagtgagagccaggatggcttcgtggctgtacacaggggacctggcatcaaacctgcccagggttctggacgctgctctgcctcttccaggctgtcactgtgggcacgtgaccccacttctctgagctatctcaaaaacaggaatcatagttgtgggattgaaataaggactaaatgagctgatgtatttagaacggtgcttagcacctggaggcatcaatacaatttgagctattcttcttcttcttgaaaataactttaaattattatttttagaagtaggtgctcagtggatgcccatttaatagataagaaagttgaggctcaaagatatgatggcacctgccttaggttccagctaggaaggggtagggtcaatatttttaaatgaggctggccagacgcagtggctcactcctgtaatctcagcattttgggaggctgaggaaggaagatcgcttcagcccaggagtttgagaccagcctgggcaacatagcaagaccacgtcgctaaaaaaattaatacataaaataaaatgaggctggcagattttcaagtggaggggcaaatttgatcttgcaactgggtaccatgagagaggtctgatttagggggtatctaggggcaaagcatctagaacagcagaaacgactgaggcagcgaggaaatgccagcggcagggaagagagctaccaagagggcaaaggttgggggtcacagtcccaagaagagatggcccaaagcaaagacagaaatacaaaagcacagtgtcactggggaggagacattccctaagtgccaggaaagtgcagggcggaggtggagaccgtggcaggtggcccggccatgcccccctcccagctggaaccctgggggagctgggcacctggttgttcacacggcaggggaggaacagccctgtcaactgctggccccgggaaactgggcctggggaggacatgcttgggcataataagttagccctgggggcagggcagagctggcctcgggcccagaccctgccgcaatgaggacaggcctggctgtggccccagcatggtgtctgttgcaggtggccggactgtgccatgctgctccagacccaaggtggcagctctcactgcggggaccctgctacttctgacagccatcggggcggcatcctgggccattggtgagagcggttcctgtgcctctgacctcccctggcccctgcagcctccagcctgcctgccctcacccctcccttctctgcagtggctgttctcctcaggagtgaccaggagccgctgtacccaggtgagtggagcaggctgggaccctctgggggagccctggaggacacgtgtatctggcgggagctcaacaagcgtatttgttgaataaatgcacaaatgcatgcagaaatgctaatcataatagtgcatttgtattgagtgcctgctatgtaccaggcactattctaagcaccccacatgtctaacccagactttttcagacaccagtgtattactcatgagtgcctcataaaattaaattagtgagttggaaaaccatgttttttttttaagtatgaaatagattcgattacagactatcacagtacatctctcagtaagtaaaggttatgctaatttttgtttgtttttttttttttttgcatccatatacatgtaatcccactgcatccccacactctgagggtgggactgttattctccctgttttacagatggggaaactgaggctttgagcaatgcagcagtttgccccagactacagagctatgggctacatcaggatgtaaaaatgtgtttcttactgcgtggcatggtgaaaacatgttggggaggcatgatataaattcagtggacccttctaactctcctaggaggtagtttttttgtttgtttgttttaaaaaagaaaaaagtcttgctctgtcacccaggctagagtgcaatggtgcagtctcagctcaccgcaacctctgcctcccaggttcaagcgattctcctgcttcagcctcccaagtacctgggaatacaggcgtgtgccaccatgcccagttaattttttgtatttttagtagagatgagatttcaccatgttggccaggacggtctctatctcctgaccttgtgatccacccgcctcggcctcccaaagtgctgggattacaggcatgagccactgcgcctgtccctggtaattagctccattttacagatgtgcaaaatgaggaccagagaggacatgcagctggggaacgaggggccaggaacagctcttagacttatccactgtaagtgtgtctgcaggcatgtggaatgaatggccacacaaataaatagataaagaaactaactgtgggatgaatgaatgaatcttcccaaatgccaacttcaagctgccattccctgatgcaggacagcaggaaaaaaggggaagttgggtggtgggatgtatttttcatgtctgtgagcctcatctaattccataaaggattcagttcacactaaaatcagaaatgaaaatccagacaagaaaagccaacatcaacattaatcatcattaccagcacttagcatttgtatgcaccagccaaggccttgggaccttatgatatcaactcattaagtcttcccaacaacctgttgtttttcttttcttttttttttctttctttctttctttcttttttttttttttttttttgagatggggtcttgctctgtcgcccaggctggagtgcagtgacacgatcttagctcattgtaacctacatctcctgggctcaagcaatcctcccatctcagccttctgagtagctgggactataggctaatgccaccatgcctacacaaaattattttgtcaataacaaattattgttatttttatctttttgagccagagtctcgctgtgtcgcccaggcaggagtgctgtggcgcgatcttggctcactgcaatctccatctcccaggttcaagtgattctcctgcctcagcctcctgagtagctaggactacaggcacgtgccaccacacccagctaatttttgtatttttagtagaggcggggtttcaccatgttggccaggatggtctcaaactcctgacctcaggtgatccacccgtctcggcctcccaaagtgctgggactacaggcatgagccaccacacccaacctcattttttaaatttttagtagagatgggatcttgctacattgcccagtctgatcttgaactcctgagctcaaagcagtcctctcagatcagcctcccaaagtgcagggattacaggtgtgcaccaccacaacccattttcctatggggatgctgaggcacagaaaggctgagtgacttgccccaggtcatggagctagtcagtgtcagggctgggatttgaacccaggcagcctgcgtagtaactgtatatagtgtctacacttgattgcttgttaaaaaaaaaaaaaaagaacagctgaattcattgccatagtaaagactgacatatgccaggccctggcggcagcctttacccagcaggcctatgaagttagggctgttacatcccaacattttgcatttgggggaaattgagtcccagtgaagcaaactgacttgcccgaggctgaccacacatcagagacagagcgaagggatcacgcccctgtcaaaagcccctccgtgacaacacgtggcattgagataaaatcccaacccatcacaggctccaagcctcctagtgtggaggcccctctccacccccacctcacactggcttctagcaccctcagggcccagtcccttgctcaaatgacctgctcacacagaagtctctactcacccacttctttctagctcacacccagaggcagatttcagttctgcacagttccttctgagctgtggggcctcccaccagtccctactctctccaagactcaatttcctcatctgtgagatgggggtaagaagaatcagtgggaataagaggagataaaaatctgtgtagtacttgggcggggtgcggtggctcacccctgtaatcccagcactttgggaggccgaggcaggcagatcacctgaggtcaggagttcgagaccagcctggccaacgtggtgaaacctcatctgtactaaaaacacaaaaattggccaggcgtggtggcgggcgcctgtaatcccagctactcaggaggctgaggcaggagaactgtttgaacctgggaggcgcgggttgcaggttgcagtgaactgagatcacgccactgcactccagcctgggtgacagagcaagagtctgtctcaaaaaaaaaaaaaaaaaaaaaggctgtgcagtacttgcctcttagccagcacagtggacattggcttttgtatctcactcctgaaattctttcttgaaatttcttgagcaagatcttcctggacttccagactctatggcctctcaccctatggtgtgtccctgccaccccggtaaaaccctcctcactcattgtgaattatttactcctggcgaactccaggaaggcagggaccttttgtggtcagacggtgcctggcacatagtaggttctcaggaaatccttgagttatgagtgcacccaaagccaaaacactgggatgaactagagagtcatgggcctccagctggaaaggagcgaggccaccactcacacccggctctggccagcaccacgccgccaccctgcagaggtatttgggtttttcaacaactcagggaaatgatgaaacaaacaaacaaacaaaaacaaccccaagcttgtatccccacctcgctttttttttcctgggattttcacacttctaaatatatccaacaacttggcaggcacaccaggtgacccagaacatcctttttgtgttgcctgaaatgataggaacaagaataaagaatttaaaagtgagaaacagcagcagagagtgtgactttaaaaatagccagaggggacatttgatgttctctccccactcccatctcccccaacacacatctataaagtgattttcccccctaaaacctcacactttctggaaatcacatttccagagcagttaacagtcattttaaaataagaatccacccctcttcctgccccagctggtgtttcaaactccaagccttggctttcatggggtgatgaggaccccccagctagaggtgccaggcattcc[139 bp omitted]aaaaccccatctctactaaaaatacaaaaattagccgggcgtggtggctggtgcctgtaatcccagctatttgggaggctgaggcatgagaatcgcttgaactcaggaggcagaggttgcagtgagctgagatcgtgccactgcactctagcctgggagacagagcaagactccatctcaaaacaaacttaaaatagaataaaataaaataagaatccgcccccctccccgccccagttggtgtttcaaaccctgagacttggccttggaattcatggggtgatgaggaccccacagccagaggtgccaggcgttccctgccccaaccccagagcaggaggccatcattaaggcaggccagccaggtggcttttcagtgccagccgtagctgaatatattaggcagggagacaggcaagggtttgtatgagacccacagaaggaacagggaatatgctggtctgggttcaagtcccggttttgctggttagccgtgtgcctctgggcaagtttattcctctgaggcttagttttcccatctgtaagatgggcatagaagtggtcactactggctgggcacagtggctcacgcctgtaatcccagcacttggggaggccaaggcaggtggatcacctgaggccagaagtttgagaccagcctggccaacatggtgaaacgctgtttctactaagaacacaaaagttagccaggtgtagtagcatgtgcctgtaatcccagctactcgggaggctgaggcaggaggatcgcttgaacctgggaggcagaggttgcagtgagccgagatcatgccactgcactccagcctgagcaacagagcaagattatgtctcaaaaaaaaaaaaaaaaaccgaagtggtcactatctccgaggatggttgtgggattcagagagccacttggataggatgcatagcatggggccagcccactgacaccccccagtaaacgtagccagtgctattattactgtgctgttgtttaaccctccagaggggaagtctcttgagaggctgtccagggcaatgttaaaagcttggggtttgaagtcactcagacctgatttcgaatcctctctccctgcttctcgtgcatttggtgacgttggggaagccaccccacctctctgagcctcagcttccccgtctggaatttggggatgatcttcgtggctcctggggtgtgcgacgaggccttggttgatggtggggcagaggtagcctagccccaggaacacagtaggtcctcagctggggagagttctacttggaagtcttgcttctccttgtcccaacctgcggggctgtgggaagacccctcagctggtgtgtggcctcaccaggttccttctaagaggatgcaaaagcaagttttcatttgactcggtttcccagaatgtgctctcagagcccaggccaggcaggaggctcttgagaaaaggacaaaaagacatggtggctcacacctgccatcccagcactttgggaggccaaggtgggaggattgcttgaggccaggagtttgagatcagcctggacaatatagcaataccctgtctctacagaaaaaaataaatttaaaaggcgtttttagctcaggctttgctgggttctaacctggctattgtcactcagctttatcctaacataaaaaaataaacaaattagcagggtgtggtggtatgcccctgtggtcctagctacttgggaggttgaggcgggaggatcgtttgagcccaggaggttgaggctgcaatgagctatgatcgtgccactgcactccagcctgggtggtggagcgagaccctgtctcaaaaaagaaaaaaaaaagtggcagggagaaggaaaggaaaggacaaagaggttcacagctgatctctccctgaacctgctccttccgtccccatctctgtcagccccatcttttcaggctcaggccaaacccctcggttaccctcccagttcctccagtcacccatgaatcagatcttgcaggaaaccctgtcagctgcacctacagaacctctccaaaatctgaactcttctccccgtccactgcccccaccctgctccagcccccttcccctcccctctggacatcccagagcctcctccctggcctccctgctcccatccctgccccccaatcatatcccacaaaggggatatgactcactcacttaaccggcaattctggagggtcttaaaacctggctgcctcaagaggctttaaaatgttatcagatgggggccaggtacagtggctcatgctggttccccacttgcagccagagggagctggtgaccacctgagtcaggtcagggccctcccctggctgcacctcacaccaggtgccagcaaagccctgatgttgctctatttctagctcccacctgatctgcccctccctggctcactctgctctggcctcccactgttcctggagcactccccccagtcccccacaccagccttgggatctttgcatctgcaagtccctctgtctccgtgctgatctcacacacctcctgacactttctcacctcctgcaggtctttgttcttgcaccaccttcccagggacgctctccttgcagcgactgaaaagtgcaacctcaccccaccctccatgccggcactcccctccctcggtggcattttatttttctctgtggccccttcctatcttgtgacacataatatatcctacttatttgtccctttcttgatttgtctcacctactgagctttgagttccacaggggtcggggtttttgtctgatttgttcattgcagtggtgatttgttcactgcctaaaatagagcctggcaggtacaaagtgtttggtaaatagaaatcaataccccagggtctgtgacctgacttaggtgttaacaggttcctctgaggtgtgtggggaacagactgaggggtttcaggggacatctgttctcaccacaaattgccccccaaccagccccagacatgaacagtctcccgggagctccctctagccttctcgtatatcccagccctgcctcatgtcacaatttgtaatgatgtgtttggctgggtgacattttatggccatctgtctccctatcccctataatgtggtttgccgaaagcaaagcccaggactgtctcggccatctgtgtctccaggatcacccctcactgggcatggagtatgtgtccagttaacgcttgctgagtgaatgaatgaatactccatcctctgcctggagaattacgcactttagcatatccaaggctctgacaagtcctgcataaaagagcattattgttttctttctttctttccttctttccctcttcttttctttctgactataggatattgattatcaatctggcaatagtcaagattggcagtctggtgtattagtcaaaggttttcagcctacaaaagacaaaaagaaaaaataaactggctaaaaacaaaaggggatatgatttactaactcacttaaccgacagtcacagaggttcttcaaacctggctgtatcaaggggctttaaaatgttatcagatgggggccaggtgcagtagctcacgcctgtcatccagcactttgggaggccaagacaggcagatcacttgaggtcaggagttcgagaccagcctggccaacatggtgaaaccccgtgtctactaaaaatacaaaaaattagccaagtgtggtggcatgtgtctgtagctccagctactcgggaggctgaggcaggacaatggcttgaatccgggaggcggaggttacagtgacccaaggttgcaccagtgcattccagcctgggtgacagagcgagactctgtctcaaaaaaaaaaaaaaagttatcagatgggaaatgaattccgatattaaaaattgatatgtatttatactatattattaaagttatttttcataaaacatagaagggtaagtttaagaaatgagaagtatttataccaaaatgattaaatattatttaatttaaagatataaatgtcttgttggacaaataattcaaaatttccattagacaggaaaaataagttcaagagatatattgaacaacatggtgattatagttaataacaatatattatatacttgaacattgctaaaagatattttaagtgttctcaccacacacaaagggtagtgcatgtgttaattagcttgatttagccgttccacaacgtatacatatttcacatcatcttgtacaccatcaatgtatataattttgtcaattaaaataaatacatattttaaggccgggtgcagtggctcacacctataatcgcagcactttgggaggccgaggcaggcagatcacctgaggtcaggagtttgagactagcctggccaacatggtgaaaccccatctctacttaaaatacaaaaaaattagctgggcatggtggtgcatgtctgtaatcccagccactcgggaggctgaggcagaagaatcgcttgaacccgggaggcagaggttgcagtgagctgagattgcaccactgcacaccagcctggacaacagagtgagactccgtctcaaaaaaataaataaataaaaataaaataaatacatatatatttttgagatggagtctcactctgtcgcccaaactggagtgcagtggcacgatcttggctcactgcaacctctgctgcccaggttcaagcaattctcctgcctcagcctcccgagtagctgggattacaggcacctgccatcatgcctggctaatttttgtagttttcatagagacgaggtttcatcatcttggccaggctggtcttgaactcctgaccttgtgatccacccatctcggcctcccaaataaatacatattttaaaagatagaaatcactctggaaggagagttaatctgtttgatataataataataatatattaatattatattataacaatatattagtattatattctaataatatattaatattatattataataatatattattatattataacaatatattaatattatattataacaatatattaatattatattatgtaataataatactactccatatagctatggaaaagttcatatgaagaaaccaggctatgatctacaaactggcaacaaatttgttcttctattttccatatgctgtctgtgtacgtataaagtgagaggtctttttatatgagttaagggtgtgaccaaagacaaatggaaaaagacaaatgacaaacatactaataaagagcttcggtttctccacaaaaaatacaataataaaataaaatgttatcagaaatctcttgactctcctccacgttagctcactttttccctcaagagggtgaacatgacccttaacagatccagcctcaagtgctggattctcttgggaacttggttaaatggttttttttcttcccgaatgtccaagtcaccttccagacctgcagctcctgagcagccaacttaggacttctaatggagagtgaagttcccctggttcgcggaggggccggccacagcctcaaggctgctgttgattggtccgacctgagtccttgagtctggcagagtgccatggtgctctgtaatcccacctgtaatcccagcattttaggaggcagaggcaggaagattgcttgagcctaggagttcaagaccagcctgggcaacatagcaagacccgtctctacaaaacaaaacaaaacaaaacaaacaaacaaaaaaattagtcaggtgtggtggtgcacgcctgtggtcctagctactcaggaggttgaggtaggaggatttcttgagtctgggaggtcaaggctacagtgagccaagatcacaccactacactccagcctgggcaacagagcgagaccctgtctttaaaaaaaaaaagtccttgagtcatgattccagatgcaatcgcagatgtgggggctgcaaccctccgatgggctggggttcacgtctacaccacatggctggagcacaggccaggaggggctccggctggggaagcatgtggggagcctggctgtgggacccaggcggccccgggccctgtcgccctgcagtgcaggtcagctctgcggacgctcggctcatggtctttgacaagacggaagggacgtggcggctgctgtgctcctcgcgctccaacgccagggtagccggactcagctgcgaggagatgggcttcctcaggtactgggggccctcggaggggtgggagccgggaggggctggggagcaggcctaacccctgccccgcccagggcactgacccactccgagctggacgtgcgaacggcgggcgccaatggcacgtcgggcttcttctgtgtggacgaggggaggctgccccacacccagaggctgctggaggtcatctccgtgtggtgaggagggcagcgggcaggtggggcaacacctcagacccccaaggcactccctctccccgttttccttccacctgtcttaactggtctctatttcctttctttctgtgtctccaatcccatctctcccagtgattgccccagaggccgtttcttggccgccatctgccaaggtgagatcctaaaactcagaaccctctcctttaggcccttggggaggccacgtcccctcaagctccccaggatggggccatgtactttcagaccccctagggcagggccaagcctgggctctggggacctgggctccagtcccctgtcgccgccccctgctgacccttgtcccacagactgtggccgcaggaagctgcccgtggaccgcatcgtgggaggccgggacaccagcttgggccggtggccgtggcaagtcagccttcgctatgatggagcacacctctgtgggggatccctgctctccggggactgggtgctgacagccgcccactgcttcccggagtgagtgccccccaatggcgctgatgatggggaggcagaggagcggagagacagtggggaggagggcggattgtgcccaggcaggtggccaccctccacccctttccctggtaggcggaaccgggtcctgtcccgatggcgagtgtttgccggtgccgtggcccaggcctctccccacggtctgcagctgggggtgcaggctgtggtctaccacgggggctatcttccctttcgggaccccaacagcgaggagaacagcaacgatattgccctggtccacctctccagtcccctgcccctcacaggtaagtctaagggctgagccatggggcttgaggacccgaggccaggaggacagaggaggggaccaggggcacaaggcaatcaacttatggctcaggcatccttggcaataaggggaatgatctcgagggagcacaaagtgggccttaactatcaatgatcagtgcagccaatttggaaaatttgccagcatttccccaagaagtatacataaagttaccattggacccaacacttccactcccaggacaggaggtatatacctaagacaaatggaaactgtgtctgcaccaaaactcgtacatcagtgttcatagcagcattattcataatagcccaaagatggaaacagcccaagactgtttcatcggacaaatgcataaagaaaatgtggtatattgaccgggcgcggtggctcatgcctgtaatcccagcactttgggaggccgaggtgggtggatcacgaggtcaggagtttgaaaccagcctggccaacatggtgaaactccatctctactaaaaatacaaaaattagcctggccaacatggtgaaactccatctctactaaaaatacaaaaattagcctggccaacatggtgaaactccatctctactaaaaatacaaaaattagcctggcgtggtggcacacgcctgtaatcccagctactcgggaggatgaggcaggagaatctcttgaacccgggaggtggagattgcagtgagccgagatcacaccactgcactccagcctggctgacagagcaaggctctgtcatcttgaaaataaataaataaataacaaaaaaaatgtggtatatccacacaacgggagaatattggaccatagaaatgaatgaggtactgattcatgctaccacaaggatgaaacttgagaacagtgctgaatgagacaagccagccgcaaaggccacatactgtaggatgccacttgtatgaaatgtacaaggctgggcacggtggctcacgcctgtaatcctggcactctgggcagctgagatgggaggattgtttgtgctcaggagtttaagaccagcctgggcaacatagcaagaccccatcacttaaaaaaatgagctaggtgtggtgacggatacctgtagttccagttactcaggaggctaaggcaggaggatcacttgagcccaggagtttgaggctgcagtgggctaggattgtgccactgtactccagcctgggtaacagagcaaaaccttgtctgttaaaaaaagaagaaagaaagaaagagaaagaaaagaaaggaaggaaggaagaaaagaagaaaagaaaaggaaagaaagaaaagaaatgtctagaataggcacatcggtagagatagaaagttgattgatggtggcagggtgggaggtggggatgggagattgggaggtgactggtgaaggacacaaggtttcttgtctgggtgatgaaagattctaagtcgatcatgatcatggttgcacttgtctgtgactacacaaaaagccagtgacttgtgcctttaaaaggaattgtctaatatgtgaatagtagttcaatcaagctgttaccaaaaaactaataaaatgaaaagaaaatgtgttaaaaatgaatgaatcagacttagaaagtaagttaggagtcattccctctgcaattccctggagtattcccttggtcttactgagactcacttaggtgccaacatgtccttaacacctctccaacacatacatcttccttttggattaaaagcaggccctgggcttcagatttcagcaggctgcagtgtaataataataataaaaataggctgggcatgtaatcccaggccaaggtgggggtatcgcttgagctcaggagttcaagactcgcctgggcaacatggcaaaaccccatctctacaaacaaaaaaaattagctggctgtggtggtgcgcgcctgtggtcccagctacttgggaggcggaggcaggagaatcacctgatcacccaggagatcaaggctgcagtgagccatgatcacaccactgcattccagcctggttgatagagcgagaccctgtctcagaacataataataataacggtgataatgatgatcatgaagtagtaatagcgagtagtattcgagttcatgattgagtattcgagtatagcgagttcatgatcatgaagtagtaaaagggaataagggagtacatgatgagtgtacacaacacagtaaaataatctggtaaacatagcagtgtgccaggcaccattccaaatatgtcctgtgtatggactcacttagttctcacagcaaccccagcacaccctggtaaggagggttctcttaagatcctgttttccacccaggaaaaggtcccaacccaaagaaggcaaacaatgccccaaattcgtacagctggtgaacggcaaagatttgtgcccaggtggactggcactggaatctgtgcttgtggcccccacgctgtggtgacggagaatccagggccatgttggggttggcattatgtttatttttatgtttattttatttttcatgatctgtggtactggtttcccat[131 bp omitted]ggccaacgtggtgaaaccccatctctactaaaaacacaaaaattagccaggtgtagtggcaggcacctgtagtctcagctactctggaggcagaggcaggagaatcacttgaacccaggaggtggaggttgcagtgagccaagatcgttgccacacccttctccttagtgaaaagagtgagagagttaatattgaagtaaggacgcatctttgaggacaggtggacaggtggaagcggctgggatttcagacacagggctgagggggtcacagcatgggctttggggtcagattcagatatttgccaactgtgtgatcttggacacatggcttcacctcaccgtgcctcagtttcccttatctgtaaaatgacttcctagggttattgagacaattaaaagggttaatatgagtaaagagcttagagaactgccagcacatagtgaacactggtaaatgttagcaattgctactattgttgtttaatacttttactagttatatgaacacttgctgtttgcctggcatgcaactcaatgactcaccaatttctcactacaacttctggggataagtgattattatttccattctacatctgagagctctaagactcaggcaggtgatgtcatcagcaggcagcaggcagcaggcaacaggcagggctgccaggaacccttgcataggttgtgcactgcacaaggacaccacatctcagggttaccactctctctgtagacctgtgtatttattattatgattttctgctaggtggaagtcaaatgtctcaagataggagtgtctctctctctctctctctctttcttctctctctctctttctttttttgagacagagtcttgctctgtcacccaggctggagtgcaatggcgcaatctcggctccctgcaaactctgcctcctaggttcaagcgattctcctgcctcagcctcctgagtagctgggattacaggcacctgccatctgtaatcccagtgctttgggaggctgaggcaggaggattgcttgagcccaggaggtcgaggctgcagtgagccatgttcctgccactgcactctggcctgggtgacactgcaggcttagaaatgaaaacaagctgtgttaaaacatacatgttatgaaactttggacacgtgacttggcctcattttccccctctctaaaatgggataatatagaccctacctctctgggctgatgaaacattaaagaaaatggtgcaggaaggcgcctagtatgcgatgagctcttggtacgtggcgacttccgttgtggcttttttgtttgtttgtttgtttttgagacagagtcttgctctgtcgcccaggctggagtgcaatgacatgatctcggctcactgcaacctccacctcctgggttcaagtgattcttctgcctcagtctcccgagtagctgggattacaggtgcgtgccaccatgcccggctaatttttgtatttttagtagagatgaggtttcgccacgttggccaggctggtctcaaactcctgacatcaagtgatcctcctgcctcggcctcccaaagtgctgggattacaggcatgagccactgtgcccagcctattgtggttttttttttaaagaacagagagggcagggtgtgttaggggccatggtagcagctggacagaggtttgtaccaggtggggcaggccagcgggggctggaccagcattgtctctctcacagaatacatccagcctgtgtgcctcccagctgccggccaggccctggtggatggcaagatctgtaccgtgacgggctggggcaacacgcagtactatggtgagtcctgtcctctgcctctgatgccaccgtttgggagactctgaactaggctggggatgggcagtctggctggttggatgagtcttgaccatgaggagtagggacgctgaggggaatggggtgggcaccaggagggaaggggggtgtgtacaccccccagctctggccagccttgcctgcacacccccaggccaacaggccggggtactccaggaggctcgagtccccataatcagcaatgatgtctgcaatggcgctgacttctatggaaaccagatcaagcccaagatgttctgtgctggctaccccgagggtggcattgatgcctgccaggtgagggactctgtaggggcagccccctggtcgctgccaccccagggatggagatgcaggggagtgggtggtcaggctccccatctaaaagcctgagggctctggggccacagcccatgtcatcccggggtgggcctcctgtccaaccactttggccttcagccagacctccctctcccctcccagggcgacagcggtggtccctttgtgtgtgaggacagcatctctcggacgccacgttggcggctgtgtggcattgtgagttggggcactggctgtgccctggcccagaagccaggcgtctacaccaaagtcagtgacttccgggagtggatcttccaggccataaaggtgaaagttgggtccagatgggagccagggtggggacgtttgggtgtctaatgggggaagggaggcagagatttgttttaggaaacctacgctcaggcctagaagagggccccccttgggaacagatggactttgaagggttcctggggaagggaagccagtggtgggacgtggaagcctctcagacctcgggagcccccagctgtctttccccagactcactccgaagccagcggcatggtgacccagctctgaccggtggcttctcgctgcgcagcctccagggcccgaggtgatcccggtggtgggatccacgctgggcctaggatgggacgtttttcttcttgggcccggtccacaggtccaaggacaccctccctccagggtcctctcttccacagtggcgggcccactcagccccgagaccacccaacctcaccctcctgacccccatgtaaatattgttctgctgtctgggactcctgtctaggtgcccctgatgacgggatgctctttaaataataaagatggttttgattaatgtggcctccgagcttacaaatgtacacagcaatgaggacattttgtcaggaaggaagagaagaattaggacctggcgcaaatcagacagagagtgtgggtccctcagttcccactgatttgagatttaagattttaattggttcacttaactggaattttcctggagcaaattggcttcaggtacagctggatccagctgctctctcaaatctgccttaggctgtgttagcttcatttccaagcagcctctcctacaaccagagagagagatgtccccttccacacaaactctttcccaatcactgcagaaaaagtcccaggcaacaacaacaaaaacccaggcccagctcccattgtacagatttgggtcacgtgctcatcccttggcaaatcactgtgcaccggatgtacgcggtaggggtggagcggggtggagtgggaggcgctaggccttcaagaatcgtgtgacctgagtgtgggagtcccaaaggaaatagggtgctatttccagaagtggaaatagatgctcagtgagcaaaaaagacatctaccttgaaccaacacggaaaacggggccctgtaaggtggagatagggagacgctgggaacacagcctgagaccctcccccaacccctttctccatctgggcagcttctggggaggaacccccttctgtagagcctctgcagagcctcatgcagccccgatggccaccagggggcactgctgccccaacattgtgacacattaaggggtttcctgcctggagtcagccgcatgttgctgaaaacctgctgttctgctgaagaaaggctcagcgggggagcctgttcaccatgactttaaataataacaattatcatacatcacccatggaccacagcttccaagcaatttcctttttttttttttttttttttttgagacagagtttcactcttgtctcccaggttggagtgcagtggcgtgatcttagctcactgcaacctccgcctcctgggttcaagcgattctcctgcctcggcctcccgagtagctgggattacaggcgtgccccaccacgcccagctgatttttgtatttttagtagagacgggctgtcaccatgttggccaggctgctctcgaactcctgacctcaggtgatccacctgcctcggcctcccaaagtgctgggtgtcacgcgcatccatgtgaagagaccaccaaacaggctttgtgtgagcaataaagctttctaatcacctgggtgcaggcaggctgagtccgaaaagagagtcagtgaagggagataggggtggggccgttttatgggatttggataggtagtggaaaattacagtcaaaggggtttgttctctggcgggcaggggtgggggtcacaaggtgctcagtgggggagcttctgagccaggagaaggaatttcacaaggtaatgtcatcagttaaggcaggaaccggccattttcacttcttttgtgattcttcagttacttcaggccatctggatgtatacatgcaggcttgggctcagaggcctgacactgggattacagatgtctgctgccacacctggctaatttttgtatttttagtagagacgggtttcaccatgttggcaggctggtctcgaactcctgacctcaggtgatccgcccaccttggcctcccaaagtgctgggattacaagcctaagccactgcacccagcccagcttcctaaaatatagatgatctacaagagctcctttgagaaactgacaaactgtgcatttggaaaacgatcccagcgtcactccccgatccccacacccctggcgaggttgagccccaccactgctttgttggtcaggagcccccaggcccacatcgtgttagcagagcctcagtgcagtttccccaaacgtctacctctggctgtggtgttctacccatggcatgtgggatgtaatttgagacctgacctacggcttgctttgttagaaacgtattgagttacaacacggagtgactgagttttcctttgtaattgccagctgagaaatgtactgtacctgtgttttaggaagtctggggactctgagagaacatggtccaccctgggggttctaaactgaggtgaccatgtcctggagggacacagtttgctctggtgaggagaagggcgggtgtgaggggcactgaagaaggcatggccctgccctgggaagtctgggggggatgtggccttattctaggggatctgatggaaatttggtcattaaaagccaacaggcatcctgctgggaaaataaaaaccaggtggccatgttattggaaaggggtcctgatccagaccccaggggttcttggatctcgtgcaagaaagaattcatggcaagtccacagagtaaagtgaaagcaagttgattaagaaagtaaaggaataaaagaatggctactccatagacagagcagccccgagggttgctggttgcccattgttatggttatttcttgatttagtcttgatttattatttagttatgctaaacaaggggtggattattgacgcctcccctttttagaccatataggataacttcccaacattgccacggcatttgtaaattgtcatagcgctggtgggggtgtagcagtgaggacaatcagaggtcactttcatggccatcttggttttggtgggttttcccgacttctttactgcagtctgttttatcagaaaggtctttatgacctgtatcttgtgccgacctcctctctcatcctctgacttagaatgccttaatttaccgggaatgcgggccagcaggtctccgccttactttacccaggtcctatttaagatggagttgctctggttcaaacgcctctgacagccattctgagttctgtctgcactgttgctttgttggaggagtggaggggctggggagattgtgattcactcaacagccattcactggtttcccttgtatgccaggggtcagtgagcctcagtttctcctcctgctcccagcaaccttgccactcaccccaaagagctaggaagatatttaaaaagaataataacagtcacaaggttgctttcagttcctgccagggtctcagtcttcagaaaagctgaatatgaaaattacttccatgtcattgtggtgccgctcagaatcagaaatatttgacccatcttacagaattagtgcaactacatcaggaacccaagccaagttttgcattcctatttagcatttatatctacatagtccttttcaaatatagaaaagctttctggatgttagttggaacagatagctccatatgtggttataagttggcattctcccagctgggttgaaggagaaatgtacagctactctgccacaacagttatttcatacataaaatcacagccatgattagcaatgatggtgaaggctattcattttatattcagaaataattattgtgaacattcagatagcagcataagtagggagatggactttagtttctgcataaaaagtaacactgtttcaatcctgcagttatgaagcgaggagctgttttggctcttgctgcatgacataccacccaaagctagtgggtacagtaaatgctcatggattctgcagctcagaaagttggacagggaacagcaggcacagcttgtctctgctccctgatgaccaggtccttagctagaaagcctaaaggaacagggactggaatagggaggcttcttttgtttgtttgttttgaaacagggtcccactctgtcgcccaggctggagtgcagtggtgtgatcatggctcactaaaacttctaccacctgggctcaatcgatcctcccaacttagcttcccaagtaactgggactacgggtgtgtgccaccatacccaactaattttattttttttttgtagagatgggactggttgcccaggctggtcttgaactcctgggctcaagtgaccctcctgcctcggtatcccaaaaggaggctctttactcacaagtctagtatccgggctgggatcactcaaaagctgagctcagctggtactgtggactcattgtctggctaacttgggcttccttccaatatggctacccaaggacatttgaacttctcacgtggtggctcatggctccagagtgagcattccagcagacactggcctttacaccccagcctcatttctgctccactctgtcagctgaagcaatcacaaacctgtccagaccctagaggaggagatggagaccccaccctttggtggtggaaggcaggtcaaaaaatttggggccacatcttaaaactgccctaggagcttatggactatcggagcaaattaacagctgacaaagcagagaaatgatccctcagtaaggtgttcaacctgaaatatttccctgctaaaattgtggataataaaattatgacagtaataactttttagaacactttcacatttgttcttacattacagaagttcattctaagaaggtgatagtcagctttgggcaaatctttaatttaatacttcactaattagcatttggccacaatgcctgtttcacttctaaataataataataatttatattaataaacatatccatgcatatttttgagcacttcctatgtgacaggtactgtactgagagttttatacatgttacttcagtatttccccaaattcagatgtttgaaagtggctgtcttaatttttgctattcattcattcaaataatatttattaagcacctattatgtgccagacactgttctaggaattggagaaatataggggacaggacaaaccaactttatggagcttaggggcaaacaaataccgctggtactacttgtattgttttattcaaattatctcttttccttttgtgtgtgtgtgtgtgtgtcttttttttttaagcttagccttgactttatttatgtattatttttattgatttatttattttgagaccgggttatgagactggctaatttttgtatttttgatagtgatggggtctcgctatgctgcccaggctggtctcagactcctgggctcaagcgatccacctgccttggcctcccaaagtgctaggattacaggcatgagccactgtgccctgccagccttgactttaacaataatgtttatgaaactgtgggtttgaggccgggtgcagtggctcatacctgcaatcccagcactttgggaggccgaggcgggtggatcacgaggtcaggagattgagaccatcctggctaacacggtgaaaccccatctctactaaaaatacaaaaaaattagccaggcatggtggcgggtgcctgtagtcccagctactcaggaggctgagacaggagaatggcgtgaagccgggaggtggagcttgcagtgagccgagtttgcgccactgtactccagcctgggcgacagagcgagactctgtctcaaaaaaaaaaaaaaaaaaaaaaagaaactgtgggtttgatgtggcggtggcagatatatgtttttcaatataaatcaaaacaaatgtattaaataaacaaatgctagtgaaataataacaattccttcttcactgccatcctatactctcccggggtttcccgccagcagcccatgtgccgccctttgggaaacacttgtttcatcgccatgcaagctgggaaggagggtctgtggggtttgctgtcctacagaggggctgcatatcccgtccaaggtccacctccgaggggcagggctggcgctggggcctggggctggaacagctcgggatatggcactgagctctcattcccagcctctctctgctgagcaggttcggacactttctccctggcggggtggtgggggggtccctggaccgctagggaagtgcatgtgtccagatgctggcggtgttctggagaaaaagatgggatgccttaacccagacactccttggactggtggtgcaaaaaggagccttcgaatgaggactgggcccaggtgtggcaggccaggtctcactaacgcaggcctccataacaactgtttcagcaccgactgagtggctaagtcaaatattaaaagctgatagagccagtgccctatacaaaagctggaatgtaacaaaagcctaccaagagttttgctcaggcctttcctgggctttaaagcatgacaagataaagaatgaattcttaacaggacccttttaggattaaacaagtttaattgggggtctgaagaaactacacttacacacaggcatatagcttagaaggtatataagctctggaaaactttgtaattttgagttggtctggggacaatttccaggctttcaccctataaccagttacagaaataaaaactcccttttcgctgggtgcggtggctcatgcctgtaatcccagcactttgggaggccgaggtaggcggatcacctgaggtcaggaattcgagacaagcctgaccaacatggagaaaccccgtctctactaataatacaaaaattagccaggcatggtggtgggtgttggtaatcccaactacttgggaggctgaggcaggagaattgcttgaacccgggaggcagaggttgccgtgagccgagacagtgccattgcactccagcctgggcgatagggcgagactccgtctcaaaaaacaaaaacaaaaacaaaaacaaaaacaaaaaaaacctccctgttctcccagtttatctgcatctcatcactgggccatgagaaatagcagcctaatcctcagtttggtccaggaacacaggtgaccctctgtcccatgtggtttgaccaggtaaagggctgtctggggtttgagggtctggagcacccctttgggacactgctttgaagatggagtccccagtgcctaactctgagcctcctccaccagggtggtccgtgaatctcacaggtgcacagtaacgagcccccttgcctgtatgctcctcctccccgtctccccgttcacgtctccaggcgaatctccccttctgggtccagtaacactcctaaatgcctgaccttgactatccaccatggcagccccagccatgccctgcagatgcccacccctgggcccccggggctggccagcagcccacgagtctccccagccacacatcttggccctgcttgatgcacatgcactccgttcctggatgctgtgtgctcatctctaacctgctccaagagaaccagcagggccccatgggaagaggctccctgcatgttcagctgtctgtcagcagcggcccttcaccaagcagtggctcaactttcccactgtggatcgcttgacttgtgcccagccctgctaatgggtggggggttcctccagggtctggcaacccggccccctgggaaagccctggaagatttccatcccctctttcctcccttgccctgcccaccaaccccagacctggcccagcctcaggcagaccggatgggaaccaggatccctgggagacccccaggccccctggaccctcgaacaatggaaggtgagctccagctgccccgtccccaccctggccccacctctgccctggtataagcccgcctggcccgcagcacctgcagccaccatggggatactgtggcttctgctggtgggtgagtaggagtggggactctggaagggggtcgactgtgccacgtgggccccagcccttagctgacatccttcccctcagtcctacagaaccaagtgacttggagcaaggagatcagaggtgagaatggatgtgctccctaacctggagagaggacagggccatgtggacaggcagggagggctccaggggtctgaggagccatggccccaccctggagtccctcaggggacctggagctttctcttggggactgaggggacacagccctgccctggggctctgaggggagcctcagtggtctcgtgtccccagcctcgctcctgtacccctatgggctggagtgtggggatcaggccctccctgcagaggatgatgacttctctgaggagctgcggctgctggagcccttcatgctctttgaagccacacacgggacggcctatgtgagtgccctggccctgaccgtgcggtccctgggctctctctcttctccccaccccactcttgactcggagcctgtctatatctatagctcctggctccttctggcttcgtcctctgtcttcctggggcgggccctgtccctcttctgtcccctgccctgccaacacccccctgcgggtcttgcccttcctcacttcccccagttctgcaccaatgggctggtgtccttcggggagcctgtggctctcttcacactggaggcatttccccaggagatgggccaggccttcgcagtcccgttctgggccaatgggtccacactgagcaggggccagatgtggtaccggcagagccgccagccagagctgccgcagcaggtggcctgagacctggcctcagccttcccccatgccccgcccaccccttgcgccctgctggtggccatgtgggaccaaattccattttacggggcacttggtccccaggtgaggaagcgggtggcagagaagggcccaggctgaggctgtttggcccaaccccttgggaagaagggcttggattcctgggtaaggaggagacaccacggaggagagacggagatgggggaacgagggagagatagagggggcgggaagagagagacagagagacggaagcatggagatgcagcgaggtagagaaaatgggtgagaaagagggaagacacgaacagggagagaaatggcgagagagaggaggcaagacagcaagcgagaggagtgagatgatcagatggagagacagagaataggaaaaggagagagacggagagagagaggggatgagagcagagcagaaaaatcgagactgggggatgtgaaaggaaggctggcacaggtgccagcagaggcagctgtggacatggtgtggacaggggcctgggaggtggcgtggatgggggtctgggatgtggcatgggtaggggcccgggatgtggtgtggatgggggcccaggaggtggcacagctggaagcagccagcttagtggtgcagatggagctcggttgaggactgggcagtgaggagggtcctgggtgcccctggaccagcccacgacaccctggctcctggcgcttgccctgcaggtgaacaccttccaggaggtgctggccctgggcagcggcccctcctgggtgctgtttcaccacaaggacatccagtggaccatgggggtggccagcggtgggagcccccaccacggcctggggggcattgcggcccaggtgagtggggaacccacaggggcctccctgggtccttggggagggtgaggacgcaggtgggctgaccctgttccaaatgacacccccaggcaggcttcaacagcggccgacagagggactacttcacccttcctggctcccggacctcaggcatcctgaatgtggcagacaccagcaatgtgggcatccccaggcactaggccttctgcatcaacagctttgcagtccccaacggctgcacctacaatggtgaagggtggagaacctgccccagacctgcctgctcccagggcccagccacagagcccaggagcccaggccccacactctcctcctccaagacccaggagtccagtcagccctcagtccattccatccttagatccaggaatcagaggccgggcggggtggctcatgcctgtaatcccagcactttgggaagccgaggcaggcggattacctgaggttgagggttcgaggcttgaccaacatggagaaaccccgtctctgttaaaaatacaaaattggccgggcatggtggcacatgcctataatcttagctacttgggagactgaggcaggagaattgcttgaacccaggaggcggaggttgcagtgagccaagatcgcgccattgcactctagcctgggcaacaagagcgaaactctgtctcaaattaaaaaaaaaaaaaaagatccaggagtcagaacccccagtccccaccttcctcaggacctgaggttcaagcctcagccccagacacccccaccgcagcccactctctccacagcccagttcctgcccctaggtgcctctttgtggaacagcagtgcctgcagccaccacactgtgggcaggaaggccgggtgtggtgctggccagagggctgccaggtggggcagcagtgtatgcctgcacaccccttcccacactgctgggcccctcgtggcccctcctgccacctgggtccccagggccacccgcacacactctccagatggcagctgtggctccagccctgccacttcgtcctggccctgcttcctggcatctgcgtggaggtggagttgaggaggggaggcccggtggcagaggccctggtgcggctggtcatccatggctgggatgtggtagtgagatcgcatggcccaatagaacacatcctggtgagtggggctgggagccgggctggaggatagaacccggacagccgtggagtcgcagacacactaagtgcccacagccccagagactgccacagagactggcgggcagagtcaaatgttagatggacaggcaggcagacagacagacaaaatgaataacaggcagagagacggacaagaagacagaccagctggccaatggacaggaagacaggagggttggacaggtggacaggttgatggaaagacagacagagtgacgttgggatgaccagagcaggtggcaagacagacggcagaagggggctagatggacagaaggacacatggcgagcagatggcgaagcacttggtggactcgctgaggccgacgatggtcgcaggcagacagagcctcccgggctctcatcctagccatggacctcacattgcccaccgatgcagccctccggggcctcagcgccacctgtccccttgaccccacctttctctgttatacaacccagtttctgccgcccaccctctggtttcctgactggttgacctcactggccgccccatctgctgagcctactgagcctacggtgcttccccacttcttaccttctgggacatcaggctccctctcaaatccctgcttgtctacactcatacctcctgcgctccttcctccaataccccacaggtgaaccacacctctccacttgcactcacccctgcatgtaggcagcagagcacacctgggctggtgtcgtacctgtgactgtgaacttgaaaggaccttccttccacctccctggcaccctcactcacctcctctccctggccacctgttcacacctactcctctccctttagaccaaacctcctccctggaactcattctcagcctatgagatcgcttcctacttcactggtagcatcagctggaacctgccaggcactccccaaccctccacctacagtccaggctgccatgatggagggtggtctgtgctccttcctggcttggccacctctgtgacagttcctgcatctcccagcaatgcttcctctccctctcctctatatccgtgcttctcaaagtgcagctattagaccagtagcatcagtagcacctaggaatgtgtttgaaatgcaaattcttgggtcccacccaagaccaccactctgggtgggtacatgcaatctgaattttttttttttttttttttttgagacagggtctccgtcactcaggctggaatgcagtggcacgattttggctcagtgcaaccgcctgccttggcttcccaggataatgggattacagggagtgcaggccagcactcctggcttgcagtctgtttttgctagcccttccggggattctgatgcatgctgagctccaatgagcttcaccatcaatttgctatttttttttttctttttgagacagagtctcgctctgctgaagtgcagtggtgcaatcttggttcgctgcaacctccgcctcctgggttcaagcggttctcctgcttcggcctcccaagtagctgggattacaggtgtgtgccaccacgcccggataatttttgtatttttagtagagatggggtttcaccatgttggccaggctggtctcaaactcctgacttcaagtgatctgcccacctcggcctcccaaagtgttgggattacagatgtgagaacctgcgcctggccaatttgcctttttctaccagatccttctcactgcattccaataggctacaattttgccatcttcaaaaacctttctcctcaatccttcctccgcctctagccactacctcatttctcacataccctgtacaagaaaagcacacagaagagttgtcaggctcactgcctccaatgcctctcttctttctttgagagacagggtctcattccatggcccaggatggaatgcagtagtgcagtcatggctcactgcagccttgacctccaaggctcaattgatcctcccacctcagccttctgagtagctgggaccacaggcgcacatcaccacggctggctatcagttcctctcttttcattctctctttcggaccttctctagtcaggctttttccgccttcaacttcatgcagccaaaactactctcgatgaggtccccccaggacagtagtcaatcttcaggccacatcctgattgaccgccagttatgtctgacacagccctgtccctcccttctccatgagacactcttcccaatttccaagaccccacattctcccggttctcctccagccatgcgtccccatcagcccacacgctaaacactggagtgcccagggctcagcctgccctcctctcctccccaccttcacccattcctgggcactcacccaggctttctgatggaaacacaccaatcttctcctacttttcctcttaagaattttacctgaccgggtgcggtggctcatgtctgtaatcccagtgctttgggaggctgaggtgggaggatcgcttgagtctaggagttccagaccagcctgggcaacgtagtgagaacccatttctacaaaaattttaaaatttgccaggtgtggtggcccgtacctgtagtcccagctatgtttcagagcctcatggcatcttctccttcttgctgacaagtgcatttctatctgaatgcctctcgctgggaacctgcgccatcacactcaccccatgccaaggccccgaccccacagcagggccacattctgcacctgggaccgcaggagctgagccccaactgccgtgagctgtgtgagtgcaaggaggctgggcagccaccccactgcagcccccaggcgtgtgaggacggggaggcctgcttcctgctcaccggggcctggtactgtggggtccggagaggtagcagctgggtgtcaggtgacccccattaccacagcttcaacagcacagccctcacagcccagggtgcctgtcactatgtgctgagccgcacctgtcaggccggcctgagggcacaagctttcacagtgtgggtggacaatgagtacctaagtcccacggccctcatgactggggctcggccgatcgaagtggacgtgcacggggtgaaggtgatgatggaggctcagacccccgggagggcacaggtgagcttgggcaggggctgggatcaggccccagaagggcgggcttagactcaggaatccggggaggacccattcacatcctaggaagacttgaggggacacagcctcaccccaaaggttctcagggattcccagacccacctaggggtgtttgatgtggacatggccccgggtgtgtctccaggttaacaggacccaggcccacctgcccctacgcctggctggcggccaagtgcacgtctatttcagcgattctggggccatgctggagactgacgctggcctcttggtctcctacgactggagccaccatgtatccattatggtgcctgagtcctacgctggcaccctctgcagcctgtgtggggacttcaacggggacccccatgatgacttccatgcccctgatggctccctcctgcctgacccggaggtgtttgcactcagcttgaagggcctggattccccagccagttgctccaccgtgggcactgcccctctgtgcccccatgaccgagagggccggtaccagtcactggctttctgtgggctgctgggtgcccacgatgggcccttccaggcctgtgatgagctggcccaggcccaagtccacatggagaactgcatccgtgacctctgtgccacaaggggttcccggcagatcctgtgcgaggctctggggagctatgtccagcagtgccagcagcacggcctcctagtgaggccctggagacacctggtggactgcggtgagtggcatcctctccatgccagccagcacgttctgccggccaggtccagaaaaccagttccgcccattttgtggggttgcataattaatgatctcagagtagctacttcaggcctggcccagtgaggcgctcgacatcactggccttggtttcatgcttcccaccaaattggctccacatccagacaggctcaccctgaccacagtggctccacaccttgcagccactcaggtttctcagcccagcaggaaagagagctccgtgggtctcagaagctccagcatgatttgcactgcgtctctgtggcttcaactgactccttcttgtacctctcactgtggccaggggaatgtgagtctccgattgacttctgcctgaccgcgggctctgcccttggggagactgcccaggcagaagttgggatgaggttagcagtgggcagtagtactggctggtgcccaaaggacaaatgtctgcggcctctcacccttgtcctgctgccaagtgatctttgtcaagagcattaagcagtctttcaaacatttttgttggagacccacaatacaaaatatagttcatttcaggatctaattctattagttttctatctcttgctgctgtaacaaattgcaacaaactcagcagcttaaaataaca[137 bp omitted]tacaagcatgcaccaccacacctggctatttttaaaactttttttgtagagacagagtcttgctatgttgcccaggcagttctcaaactcttagtgtcaagcgatcctcctgctcagcctcccaaggtgctgggactacaggtgtgagccactgcacccagctaatttttatttatttatttatttattttgagatggagtctcactctgttgcccaggctggagtgcaatggcgcgacctcagctcactgcaacctccaccccctgggttcaagcaattctcctgcctcagcctcccaagtagctgagactacaggcacctgccaccacagctggctaattttttgtattttcagtagagatggggtttcaccatgttagccagatggtcttgatctcctgacctcatgacctgcccaccttggcctcccaaagtgctaggattacaggcatgagccacccctcccggcccaactccagctaattttttgaaaatgttttgtacagatggggtcttgctatgtcaaattttttcttacaattccaacacagttctcgctggcctaaaaatcaacgtgtctgcaggagtgcatttctttctggaggctctaggggagaactgtttccttaattatttaaattgttggctgaattcagtttctgatggctataggactgagggccctgtctctctgctggctgtaacctgagggttggtgtctacttctagaggccacccacattccttggctcatggccccttccatcattttcaaggccactaacagcaggtcaagtccccattatgcttcgaaatcccctgcctctttctgatggactctctggcctctgtctcccacttttaagagcccacgtgattacactgagcccagccagataatccaggttaatctctcccttcccaaggtctagaaccttaatcacatctgcaaagtccattttgccatgtaacgtatcacaggatacagcgattagactgtggacatctttgaggggctgttcttcagctgaccacaccaatatatgcatacacagcacacaaagtgtcaccaaataggaaaatgcactcaatactttgcattacattcttttctattctatttcatttttcaaagcagggaattatcccactgatctgtatagcattgagattgagaacacagatcccaaagtcagcctgccttggttaggatgccagtaccaccactttcagctgtgtgctcttggggacgtcacttaacctctccgtgcctcagtttcccctttaacaagagaaagaatggtgaaaataacacttctcttgtggggttgttgtgagagccaaacaaataaacagtagctggcaatatagtgaatatagtgaatgctctacaagtattagctgtcactatgaaattgattttttttttgaggggggatggagcctcactctgtcacccagactggagcacagtggtgtaatctcggctcactgcaaaattcacctcccgagttcaagcaattctcatgccttagactcccaagtgtctgggagtacaggagcatgccaccatgcccagctaatttctgtattttcaatagagatgggattttgccatgttggccaggctggtcttgaactcctgacttcaagtgatccacctgcctctgcctcccaaagtgctggtgagccaccgtgcccagcctgaaattgacttttaacctgtgttaacatcactctgtcctgagatcaaaaccacagggctctgctgttggcaggtcttgtcccagagtctgggtcagcctgtcctggggagggcctgggatcagcccggcccacaccctctccagtccagcaggcagctgagatgggtcctgagccatctttttatccctttggtgtgaatgggacaacgcgaccatttcacagatgaagagcagacacagagccgcacagctggggagtggcagggaggggtccccctgggcctgatcttgccctgggtgatgcaggggccagggcaggactgagaagtgccgggtctctgacctcgtagggcccacacgctgccagggtggccgagtctgtggtggggcagccacggcagagtgatcagggctcacatgagggaagcgtagggccacaggggagcacagaggaggggctggcccagcctggaaagtcaggccaagtttcccagaggaagggccacgagagctgaggcttgaatgacaagtcaaagccaataggtaagcaaggagaagccaaatgttctagggagaaggaacaaggttttcagaagcccagagactgtgtaaatttgagccagagatgggggagcctggagagagacatggtcctgggctgtgtctgtggggccttgaatggcaggcaagaagtgaggactttatcccgaaggactgggcctctaacctccaggaccccaaggcgcaactccttttctctgcccctagtccctcactcctctcagagcaggaagcaagttcagcatcttgcaaacaaaacctctctttgtccaaaggaaacagcccattgcaagctccgaaggccaacacaagggactggtggtgggtgctctggcctctggcctgcctggcccacccctcctcccaaagccagagacaagccccgggggcatcacacactttgactaaggttaactgaacacccactaagtgctaggcagcattctaggcgctgcagacacagcagtgacccaaacagacaaaaccttgccctcatggaggcgacattccagtggagaagacaatcagtcaacccagccagtaagtaggtgattaaacagtaagtcaggcggggcagggctggggagtgctggagaaggggcatgcagtattaaactggggggttagggttccctggggtgcagagaggtgccctgggagtggagactgaaggtggtggaaaagggagccgagctggctgggggagcggggaggcggggggacattccaggcagcaggaatccaggaaacccatccaggaagggtgcaggtgtctcctccagcccccagactctgggtgctcaaattaagatgaactttgagctggaatatctcccacatcccacccaggacatttctccttttctgactttctttattaatcctgagactgggggacacccccactccgccagcgcacacacacacacacacacacacacacacacaaaaccctccccagcaatctctcctccagtatgtttttcccctgatctgtgaaacccccaaagacaagggttagggatggggtctctcttggtcaccagtgtgtcaccagaacctaccataaggcatttaaaagcataggttagggctgggcacagtggctcacacctgtaattccagtactttgggaggccgaggtgggtggatcacttgaggtcaggagttcaagaccagcctgaccaacatggtgaaaccttgtctctactgaaaatacaaaaaaaaaaaaaaaaaattagctgggtgtggtggtgtgcactggctgaggcgggaggatcgcttgaacccaggtggaggtggaggctgcagtcagccaagatggtgccactgcacttcagcctgggtgacagagcaagactctgtctcaaaaacataaaaaaaatgaaaaagcataggtcagatctcatcagattcctgattaaaagcatccctgggtcccccttacctctgggatgaaaactgacctccaagcctcctcctaagaggcccccacagcggcctctctctgctcaccctgcctcctcctacactggctttgtctagctcactccacaccgagggtccagccacactggcctctctgctgtccctggaccacgccaaatgccttcccacccctgggtctttgcatctgctgttcccccggcctggaatgctctttcccagacgtacacacggctggctccttccatcattcaggcctcagctccaatgtcacctctgcagagaggcctccctagccactgtcctcaaatcagcccatggggctcagccactctgcgctacctaaagctgggtaacacagatctaacccagtttctcaatccaaaattatcttttatttattgctagtttgtcgcccatttcccccctctagaataggccagcacacttttatgataaaaggccagataataaatattttaggctttcagggccacactctgccacaactactcaaagcttctgttgtaacataagaacagtcatagacaatacacgaaccggcgagctggctttcatgaagacattatttatagacaccggaatttgaattttacatgattttcacacctcacaaaatttcctcttttggtttctttttttctaaccacttaaacatgtaaagactatttagattgtaggctgtgccaaaacaggtggagggccagatttgggcccaagggtgaagcttgtcaacgtctgccctagaacatctgttttatgaggtcagggatctctgtcttggtcattgctgtgtccccaggccctgggatgttcccggcatgtagtggatgccaaagttgaacaaatatgtgctatagaaaaggcttcgacacattcattaattcttccaacaaatatccattgaggtttgccgtgagctgggctctggggagatagcagggaacataatttgaacgtggggcagtgagttgacatccttgcattgaatgacttgtgttcctccagagctgacctggccccccgacagccactacgagctgtgtggcttctcctgtcccagctcctgcaccgagcctgccctgcccgacagctgtctgacaccatgccaggatggctgccagtgtgacccaggatttgtgctcagtggcacggactgcttgacccccatccagtgcagctgctccatggggggcagataccacctggccggggagccattctgggctagggagcactgtgagcaattctgccactgcgaggcttccacccatgctgtgtgctgctccccctcctcctgtgggccagggcagagatgtgggaccctaaggggcatctttgggtgccacccattctcccctggcacctgccaagcagccgggcactcacacatcatcacctttgatgggaaaactgttgagttctcaggtacctgtgtgtccgtctttgccgaatcctgtggctcttccggctcactgccattcttcaggatacagctgtgaaaggagaacagatccagcagccccctcatgctcatcttggaggtgtctgtccaggttaatgggacccaggtccacctgcggagggacagcccaggcatggctcagataagcaccagctttgggacgtgtcgtttctaggaaccccaacccttcacccaaacccataggcccaagggaaaaacttattctgtctccattatttctacattttacctctattttctgattatatgcccatttttgactatatccatcagatgcattcagctaatataacagaaacactctcagaccagcttaagaaaaaaaagaattactgatttacacaattgaaaaaaaaaatctacaggtgtatggattcaggcatagctggacccaggtgcttgaacaatatgtctcaaatctgtctcaatttctgggctctcctttccttcattttcagacaggcaccatcccatcccaccttgtagggacaaggacagctgccaggttagcaaatgtcactggaggaaaagtgtccctcactggcccagcttgagtcatgtgaccacccctgaatccctgatggactagctgattggctgggcctgggtcatgtgctggaagttaggataggattgactttctgtgaaccacatggattgattttggaggggtgagttctcagggaaatccagagaaaggagaaatgaatgcagaacaggataaaacaagagatggtcactattatagttatgtccttgttccttcatctaaaaatgttttacatgtattggtacggtggcttacatctgtaatcctaacactttgggaggccaaggcaggtggatcccttgagcccaggagttcaagaccagcctgtctcaagcaggcaatatagcgagaccccgtatctaaaaaagaattaggtgggtgtgttggcgcacgcttatagtcccagcttatagtcccagctacttaagaggctgaggtgggaagatcgcatgaacacaggagttcatggctgcagtgtgccatgattgtgccactgcatccagcctgagggtcagagtgagaccctatatcaaaaaaaatcaacatttttcacgtatttgaacacctactatgtgccaagcaacactgacccaactgtggtcctatgctcccgagccttcctttgattctgcctgctccttaggtgaatggtgagacaacagccctccccgtaagcctgaatgggggcagccttgccgtccactggaatggcctcttctccctgctgcagtcagactttggcctctggctcagcacagatctcacctacagccttaccctcaccctgccccacctctacaagggtcacacctgtgggctctgaggcaacttcaactgcaaccccagtgaggacgctaaggctgacattaccttggagaagcagagcaaggcttgtagggacagctgtggggctgcctgtccagtctcagtctgcaatgaccaggggcagattgtgtcagccaggaggcagtgctggctcctgcaggacccccaggacccttcagccactgccactgggagatcaacccagacccatatgtttccagctgtgtcgatgatttgtgtcttgctggggatgatgaccacatcctctgcctggccctgcagacatatgccgccatctgccagggcgccaacatcaccatcaggcactagaggaattcttccttctgtggtgagtcatggttgagcagggcaggaattcatctgcatgctctgtatggccacacacagactgacatccttctgtactcctgggctgcctgagtgccccaaccacttcccatattcccaattccagcacaggaaggccttccaggttctcctcctaggctccagctggacgcatgtggattggtagggggcctgtatgctaccgactgttatgtttttttttgttttttgttttttttgagacagagtctcactctgtcacccacgctggagtgcagtgacttgttcttagctcactgcaacctcctcctctcgggttcaaactattcttctgcctcagcctcccaagtagctgggattacaggtgcccgccatcacgcccagatgattttttgtatttttagtagagatggggtttcaccatgttggccaggctggtctcgaactcctgacctcaggtgatccgcccacctcggcctcccaaagtgctgggattacaggtatgagccatggcacccagcccgctatgtattttgaataccaccctgggttgactggatccctggccccctgtcaaggggatgtccttttccaccctcagaatgcctgacctgagatgccacaataataatcccaacaactgctaatacttattgaacatctacaatgtcccaggcatggggccgaaggctctgtgtacctcttgccgccactgtctcagaaacaccctgcaagtgagaggcaatgactgttattattcccactttacatttgggaaaacagaggctcacagaggtaaagccatttgtctactgctaatcacaacagacagagttgagacttgaactaagactttctttctccagagacaaaagaagttttattactagccatatcatctaattctttctttcttatttaactattatggaaaatttgaacataaaagtagagagaatagcctattgaatgcccctgtacccagaaggcagcctcaacaacagccaagttgtggccgacctgtgtccacctccacccctcccttattgatttattttgtgtaaagcaaatcccagacaacgtgtaaacctgtaaatactccagcattattttttttaatagataaggacttttaaaaagaaaaaaacctgctgtggccgggcgcgtggctcacgctcacacctgtaatcccagcactttgggaggtcgaggcaggcggatcacctgaggtagggagtttgagaccagcctgaccaacatggagaaaccccgtctctactaaaaatacaaaattagccggcgtggtgctgcatgcctgtaatcccagctactcgggaggctgaggcaggaggatcacttgaacctgggaggcggaagttgcggtgagctaagattgcgccattgcactccagcctgggcaacaagagcgaaactccgtctcaaaaaacaaagacaaaacaaacaaacaaaaaaacctgctgtgatttgctcacacctaacaaaataagcagtaattcccagatatcatgaaaagcctagtccatgttcagatttttctgatcgttcctaaaacatccggctttcctcccttgcaccaaagctttgctggcccctaatgcttgcccattaagggttcctagctggttccaacattaggggcgcaatcggggcaggtcatgttctacggggtgggggtggaaggtgccgctttcttgctcaaccaacaggcaacaaaagcctgtccgataccatcctggggatcaagacacccctaaaaccaggttctaacccacctatgttagatccaaatgtgaatctctgacacctgggccgtagggaaccctcaaagggtttggaatagggaaggcggggagcggggtggagtgggggggaggtaagacagtgttcatggagtgagaaaggtgggccacctaggggctatttctggaataacaataggtcgcatttatccaaggttcccagggtgccaggcgctgtcccaaccacttaatttattttaacttgcttaaccctcaaagtcagtttgaggtcagtactcttttcggagagatgggtacggagtcctggagaggttaagcaccacgacagagccgagattttaagcactcggtcagggagttgggcaaatgtggcctgcagatcatgtttccttacccgcgctttttctcctccctgcatagccgccacgtgtcctaagcacagcagctaccagcaacgcttggacccgcgccgggtgcagctctgcgtccccgcggccgccctgcctgctccgagggctgcgccaacgataacgcgcacctgtgggcaggggccaggtgccggcacccgaaggagtgcggctcggcgcacggcggcccctcctaccaggtgagctgggggcagggtcttgctgttgtgagggggtcggcccatcatgggggtcagggagcccccaaaacatgccagggatgggcgcccaatccgggacacctatattcaattgtgcggatggcacattgtgggttcacaatgtgttgacctgctttattattgatgattccaatactgctactagttactaaggtcattccctgtgtgctaagtgcttaataatattattattggctgggtgcggtggctcacgcctgtaatctgagcgctttgggaggccgaggccggcggatcacctgaggtcaggagtgtgagaccagcctggccaacacggcgaaaccccattctactaaaaacacaaaaattagctggatgttgtggtccacgcctataatctcagctacttgggaggttgaggcaggagaatcgcttgagcccggaaggaggaagctgcagtgagccgagaaggcgccactgtactccagcctgggcaacagagcgagactctgtctcaaaaaatatatgtattattattattactgtcagcactattgactttttaaaatattagccatcacttattgagtgcatagcccccactacacactttggcaatgtaatagtagtaataataacaataatcaaaacagctcattttatttatcattaataggtacaagactctgtcctaaatgttttagcattgtggtcagtgctattttttgtttatttttatttttttatttttattttatttatttatttatttttttgacacagggtcttgctctgttgctggggctagagtgcacgggcgccatcttagctcactgcagcttcaaattccctggctcaaatgatactccccctcagtcacctgagtagctgggacttcagttgcgtgccaccatgtctggctaatttttaaattttttgtagagatgaggtctgaccgtatcgcccaggctggtctcaaactcctggactcaagggatccttctgcctcagcctcgcaaagtactaggattacaggcatcagccaccacacccaaaccatttgtattattttgatggccaacatttgagtagtgatcacacatcaggtcccatactgctaataataataattaaaatgtggccaggcgcggcggctcatgcctataatcccagaactttgggaggctgaggcgagtggatcacctgaggtcaggagttctagaccagcctagccaacatggtaaaacccagtctctactaaaaatacaaaaattagctgggcgtggtggtgtagcaggacgagctgcagacaaaacccctcagacactgagttaaggaaggaagggctttatttggccaggagcatcggcaagactcacgtctcaaaaaaccgagctccccgagtgagcaattcctgtcccttttaagggctcgcaactctaagagggtccacgtgagagggtcgtgatctattgaacaagcagggggtatgtgactgggggctgcatgcaccagtaagaacagaacagaacaggacagggattttcacagtgcttttctatacaatgtctgtaatctatagataacataactggtttggtcaggggtggatctttaactaccaggcccagggtgtggcgccgggctgtctgcctgtggatttcatttctgtcttttggcttttacttctttctttggaggcagaaattgggcataagacaatatgaggggtggtctcctcccttagtggcaggcacctataatcccagctactcgggggctgagacaggataatcacctgaacccgggaggcagaggttgcagtgagccgagattgtaccatcgcactccagcctgggggacaagagtgagacttcgtctcaaaaaaaaaaattttaaatgtattgggggctgggcacagtggctcacacctgtaatcccaacactgtgggaggccaaggtgggcggatcacttgaggtcaggagttggagactagcctagccaacatgtcaaaaccctgtctctactgaaaaatacaaaaataagccgggcatggtggcacatgcctgtagtcccagctacttgggaggctgaggcacaagaattgcttgaacccaggaggcagaggttgcagtgagctgagataacaccactgcactccagcctgggtgacagagcaagactccatctcaaaaaaataattaaatgaataagctaaaatatattgggtatttactttgtgttcatgcctgggctaagcattttatgaatagtaataataataataatggctaatatattaagagtttgggcatttacaatgtgccttgtgtaagcatattaaaataatggtgatattaacaataataatggctggtatgtaccaggcatctgctgtattgctgtgctaaccagttaatgatatataatgataaccatcgtgaacatattttggtcatttgctgcgtgtgtaatcctgtcatcgggataaaaggtaatattttctgagtgcttattatgccttgagcactgggccagcatgttattaataatggtatcagatatatgtcaagaacttggttactgtaggccagctgggtggtgagagcctcatgcgtatgaccgcactgaccttcaaacagccctttgattgcctccaatgtgcagagggggaaactgaggctacaggatgcacagagatctcaagggacagagctaggtctggactccaggtctctctgaccccaaaattgtgctgctaatcactaggctgtgctttccactgagagaaagcaggtgtcacaagtttgctgccctctgggtaaggcagtagcctgtcatgatggtcagacccccagctgttgaatctgggcatggcattcctgcccatcccatgctgagccggcccctgagcctctgctcttctgggtcagctgccaggccagcctcgggcctccaccaggccctgtttgggtccacctgggctgggctgggcagggcatgctgatctggcctccgacctggtctggctgaaccgatgcacccgccgctgcagctgtgacagaacggggcatttccgctgcagcccggcgtgctgccccactgggaagatctgtggtctgcagggtggccagctgggctgccagagccccctgggcacctgcatggccactggagatcctcattacttcaccttcgatggggccatagcccacttccagggcacctgcacctaccacctggcctatgccatccatccattcatccatctatcatccatccactcatccatccttccatccattcatccattcatccatccatccatccatccatccatccatccatccatccatctatccactcatccatccttccatccatccactcacaaaatttttctgagtatctactttgtagcaggccctgctgtaggctctggagacacagcaaagaacaaaagagacaggtctcttctctcctagagtgcacattataatagtgagagacaaacagtaaaaaataaatacataatatttcagatggtgataagtcctagaaaaataaaactagaaaggagaatcaggagtgcttgtgagtatggggtgggagttataatttttaaacagggtgagcaggaaaagcctcattgaggaggtgactttggagcagagacttgctggagggaaggagaagccttatgagcaatgagggaagagccctccaggcacagggaaccttaggtgcaaagtccagacgcagaaatgcccttagccttattaagaaagaacagggtaattccagcagtttaggaggccaaagtggatcacttgaggaagttcaaggccagcctgggcaacataggtgagacccccatcgctactaaaaattaaaaattaaaaaattagccgggcatggtggcacgtgcctgtagtcccacctacttgggaggttgacttgggaggatcacttgagcccaggagttggaggctgcagtgagccatggtagtaccactgcacttcagcctggaggacagagtgaggctctgtctctaaaataaaataaaataaaattttaaaaaagaaagaaagaggctgggcacagtggctcatgcctgtaatccaaacactttgggaggctgaggcgggcagatcacgaggtcaagagattgaatcctggtcaacatggtgaaaccctgtctctactaaaaatacaaaaattagatgggggtggtggcacatgcctgtagtcccagctactcgggaggctgagacaggaaaatcgcttgaacccaggaggtggaggctgcagtgagctgagatcgcaccactgcactccagcctgggtgatggagcaagacaaggaaggaaggaagggagggagggagggagggaaagatgaaagaaagaagaaagaaagaaagaaagaaagaaagaaagaaagaaagaaagaaagaaagaaagaaagagaaagaaagaaagaaagggagagagagaggaaggaaggaaggagaaagaaagaagaaaggaaaggaaaggaagaaggaagtaaggaaaagaaaagaaaaggaaaagaaagaaaagagaaagaaagaaagaaagaaaagaaagaaagaaagaaaagaaagaaagagagaaagaaagggagagagaggaaggaaggaaggagaaagaaagaagaaaggaaaggaaaagaaaggaagaaggaagaaggaaggaaggaaaagaaaaggaaaagaaagaaagagaaagaaagaaagaaagaaagagagagagaacagggaggccagcggccagtgtggctggagtggagtaaacccggggagagtaaggggtgaggtcggagcgttaatggggacagatcctgtagggccttgtgggtcactgtaaggactttggctttcactcagaatgggttgggagttccagggatttcagggagggctctgagcccaggaggcccctgatctgactcaggtgtcagcagatccctctggcttcatgcagtggacagatggccgaggacctggggggagcaggtagactggagaggaggctgacagaattgttcaggcagaacgtggcagtggttggaatcaggaagagggcagtagagggagtgagacatggttagattctggaaatattttgaaaggatcagctgtgggatgagagagagggcaggttccaacatgatttggtttttggcctccgcgtcctggacaagctgccactgcctgagatggagaaggtaggagaggaagcttggggtaagattaggagttcagatttgaacgtggggagttcgaggtgcctcttttctcccagagctgggacacagcaggatgcagacacctggagttctaggactggtgagggcatttgggaattgtcagaatacagctggggtttaaagccaggcaagtggatgagaaaagtaagggaagggaaacgaaggggaaggggctaaggtgaacttggcagtgtgaggtgtgaggtccttggtggcatggagcagacagctcggcttggagattcatacaccttacctgctgtggggtcatgaggagtgtatggatggcactagggggtgggagatggtagggggaaatggatcctgagctcttcccctgcactgcaggtggacagccaggcggtaagcagggcctggtgctcctgcaggtgggcacctggctccaggtacagttcaatggccacaatatgctgttggtgtgcgtggggcctgagttctggagccacctctgcggactctgtggcaacttcagtggcgaccccagtgatgacaaggtgctccccagcagggtgcccaccctcagtgatgccatctttggcaacgcctggtggacccaggacagccggcctgggtgggtggctgcctgggaccaggaagggcccgggttgggagaaatacagggctcagggaaaacagtgggcagacaggcaggctttgagaacagaaaggtggaagaagagggtgtgaattgcacacacaactctcaggagattgattcaggtagaatcaggaacaatgattataccctttcacggatggggaagactgaggcatggaagggcgaagcatctgcccaagttcccacaataagaaatgatggaacgggccgggcatggtggttcttgtctgtcatcccagcattttgggaggccaaggcaggaggatcacttgagctaaggagtttgagaccagtctgggcaacatagcaagatctcgtctttattaaaaaaaaaaaaaaaaaaattagccaggcctggtggtggtgcacacctgtattctcagctacttggaggctgcggcaggagaatctcttgagtccaggagttcgaggttgccatgagccatgctggcaccactgcactgcatcctgggtgacagagcgagaccctatcaaaaaagaggggaaaaaaatggtggaacagggatttgagtccaggcattctggcttcagggtccctgatcctaaatactccacccccccacctctcacaggggaaacaggaagcactcctcacagagaccttatttatttatttatttatttatttatttttgattcctgctccgtcgcccaggctggagtgcggtggcacgatctcggctcactgcaacctccgcttcccaggttcaagtgattctcatgccttagcctctcgagtagccgagattacaggcacacgccaccatgctcggctaatatttatatttttagtaaagatgaggtttcaccatgttggccaggctggtcttgaactcctgacctcaagtggtctgcccacctcggcctcccaaagtgttggaattacagccatgagtcaccgtgccagtctcccttcactgagaccttagtcctgcaaagtccaatgcaccaaacacacgtgctatttaaatttatgtgtaaattaaattaaacatcttctgtcacactacctatatttcaaatactcggtagcctctggttgctagtgcctgcggtattggatggcacagacttggggattcgtccaagtagcagagctgggatctgaagctaacaaagttggttccagaatccaggatctaactaataactatcctggctgggcgtggtggctcacacctgtaatcccagcactttgggaggccaaggtgagcagatcacctgaggtcaggagttcaagaccagcctggccaacatggcaaaaccccgtctctactaaaaatgcaaagattagccggctgtggtcgtgggtacctgtagtcccagctacttgagaggctgaggcaggagaatcgcttgaacccgggaggcagaggttgccaagagctgcgatcgcgccactgcactccagtcagggtgacagagcgagactctgtctcgaaaaaaaaaaaaaaattaatgactccctcatgttgagtaactgtatgaaaatcatttgttactatggggttgaggtttttaaacgtgtctaaaactgcaccaggagctgtcagctgctgggagggagaacctggtgcgggcagaggaggactagccaagggtggccaggggggaggcaggaggaggaggaggcttggaggtggtggtgttgagtcctgtgatcccccagctgccggcgggaccctggtggcgctgagccctgccaggacaggccccgggtggagcagctctgcagtgttctggcaaaccgctccgggcccttggccaagtgccactggtatgagagccccgtgtcctacacgcaggtgtgtgtctctgacctctgccagtatggcacgggcaaccgcatgctgtgcaccatgctggaggcctacgtccaactctgcgccctgcgctgcgcgttgcctgcccgcgtggcgagccagcctgggatgcagttacgtgctccttccctttcaccgcccccagctccaacgatggcctccccacttggctagctaggatgcctccttcgccggtggatcggaagccctcatccccagggagaccccagccctgcctaggatgttaacccaagcttcaagccagaccagggctcctcttgggcccttcctaatcctacctctcacctcccagcactggaccctatattgtccgagttgctcactgtgtgctgcaagtttgaagtggcctgtgggtgtgacatgcataacaaaccacgtggttaaaagtttcatcggaacaatcgggaggctgcagtgagctgagatcatgccattgcacttggcctgggcaacagagcaagaccctgtctggaaaaaaaaaaaaaagaacagtggcagtttgggaatcgtcctgtggttcattcctgcccttccctcccctgcactcaccctgatttttttctccctctaattgagggagcaaaggtttcagggttgtggcctctgggcgatctttcccctcccccaggtgtggcgtgtccagccaacagctactatgactcctgtgggccacccttcccggccacctgtgctagcctcaactcctccgcgccctgcaccctccagtgcacagtgagctgcttctgcctcgagggctttgccctggaggcgggcatcttcggtgccccacgcttgctgcggctgccacctgcagggccgctatatccgcctgggtactgaggtgctgcctgcagccccctgtgatcagaggtgcgtgtaccatggacctggacgcccgctcgagtgccaccctcatgcctgcaggccctgtgagctgtgctgccagcacaggggtgtctggggttgctaccccatgcactacgggacactgtggctgtacggagacccccacctgcacactttcaatgggacccaccatcaggttcaagggcctggctgggagatattggctagaacatgccggccacaccacagcgcctatgccatctgggtggagatcaggcgccaggagccgtgggatgccatgtgggcccagcaggtggatgtggatgtggcaggatggcagctgtcactgctggcaggacagtttggagccgtccaggtacttgtcacccagctctggtcctgggcctccaggaactctagtgagtaatgagcgtgaagaacagcaacgccgggcgtgggagctcacgcctgtgatcccagcactttgggaggctgaggcaggaggatcgcttgaggccatgggttcaagactagcctggccaacatggcgaaaccctgtctctataaaaaatttaaaaatttagccacaagtggtggcacgtgcctatagtcccagctactcaggaggctgaggtgggaggatcatttgagcccaggaagtcgaggctgcagtgagctgagatcacgccactgcactctagcctgggcaacagagaccccatctcaaagaaaaacaaaaacaaaaacaaacacaaacaggctgaagaaatggtggtggcccaagggccttccctttggagaaagagctactgggacctttagaagtgggcagagggccccagccctgagcttcagaggatccacccgctttggcctcttctggctgcgtcccactccgtgggctttggagtcctctgggaaacgcccctgacccctagagcctggagcctgcatggccctccccttccagaccgtgctccaggaatgggaattccctgcctaaaaggctcagagctgcttccagggtccacgctggccttgtccccaggtccatcctcacaagagtggaccatgcggcccacatgacgcattctaggcagcattgcaggaagccagtgtggacccagctgggcagagcggcccaggctagatgtacggggatgcagtgcctcttgcagtgagggccagagctggggctgcacagagaagagacgggcccagggcagtctctccttggatgccagatcctgtccaggaaaagttggaaattctgattttgcacctgaccaccaggacgctagggaggtttatgcatcaaggcaggaggatagaccgtattccatgtaatagtgtggcagcttggtttgtaatcttaaacatgaagatgtgtaaggtgtgtgcctccatttctactcttgtctgggcccctcagggttgatgggtgttgggtccacctggggttcggtggatgctttagctggcaacgtggtaacacggtgaagcctgtggtgatgggcccaggggaccaggactgagtcccactgtgccatttgctagctgtggaactggacctagtggctttacatctctgtgcctcagtttcccatctgtaaaagggaagtgaatggtacctacctgtatgtgaggattaagaggtgtgaattgtctaggagaaggcatttagtaagggcataaaagcatttgatcaataaataacacaggtgaggtgtgatggctcatgcctttaatcccagcacattgggaggctgaggcaggaggatcacttgagcctaggcaacatagcaagaccctatctctatttaaaatttacatttaaaattaaaaaataatagtaaataaataaaacatgtaactgcaaagtcaagccaacgttgtaccactagtgctgcatccccac[138 bp omitted]tataatgaaacccgtctctactaaaaatacaaaaattagccaggagaggtggcatgcgcctataatcccagctactcgggaggctgagacaggagaattgcttgaacccaggaggcagagtttgcagtgagctgagatcgcagcaccattgcactccagcctgggcaataagagcgaaactctgtctcaaaaaaaaaaaaaaaaacaaacaaaactgaactcaggagccaggtgtggtggttcgtgcctgtaatcccagcactttaggaggccgaggcagacagattgcttgagcccaggagtttgagactagactgggcaacatagtgagaccccactctacaaaaataaaaaaaattaggccgggcgtggtgactaacacctgtaatcccaggactttgggaagccaaggtgggtggatcacctgaggtcaggagttggagaccagcctggccaacatggcgcaaccccgtctctactaaaaatacaaaaaattacctgggcgtggtggcaggcgcctgtaatcccagctacttgggaggctgaggcaggagaattgcttgaacctgggaggcggaggttgcagtgagccgagattgtgccactgcactccagcctgggcaacagagcaagactccgtctcaaaaaaaaaaaaaataaaaaaaaataaaaaaataaaaaattagctggacatggtggcgcatgcctgtagtcccagctactcaggaggctgaggctgaggtgggaggatcagctgagtccaggaggcagaggctgcaccatgcacttcagcctgggctacagagtgagatcttgtctcaaaaaaaaaaaaagaaaagaaaagaacaagaaacgaactcaggtcacattccttctgtctcaacgccctcccatggctccacctcactgagtgaaactgtggcctatgtgaccctacaaaactggtttctgtcacctctctgcccttgtcccctcccacctgcccctcactcactctgctccagccgcagtgacctcctagtgtcctcccatactccaggcaggctcccacctcagggcctttgcacaggctgttccctctgcctgaaacactcttcctggaggtcctcatataactgatcattctcatctttcaagtctcagcacaaatgttaccctctctgagaagccctccttgaccacacacatgaaaagaaccaccactcccaccctctctctactgtaaccctactccttttctttttttttttttgagacagagtcttctgccgcccaggctggagtgcagtggcgggatctcggctcactgcaggctctgccccccggggttcacaccattctccttcctcagcctcccgcgtagctgggactacaggcacccgccacctcgcctggctaattttttgtatttttagtagagatggggtttcaccg[140 bp omitted]gtcaatcatttctttgtttatgatctatcttccttttgacagaatatgtgttcttcgaaggcaggaacttaattttgttgaaaaatagacaaaaatccctgggagaaagacaataaacaaatacagaagtaaatttatggtatgtcagaaggtgacagctggttctggagaacaaaaaagcaggaaaggggtgaggggccagtaagggtgttgccctttaagacagggtaacaggccaggcacggtggctcatggctataatcccagaacttgggaaaccaaggcaggaggatcgcttgagcccaggagttcaagaccagcctgggcaacatagggagaccccgtctctacaaaaaatcatgtaaattagccgggcgtggtgatgtgtgcctgtaatcccagcacgttgggaggctgaggcaggaggatagcttgagcccaggagttcaagaccagcctgggcaacatagtgagaccccatctctacaaaaaatcaagtacattatccaggtgtgatggtgcgtctgtagtcccaacaagtcgagagactgaggcgagagaatcacttgagcccatgatgttgaagctgcagtgagccgagatcatgccattgcactgtagcttgagtgacagagcgagaccctgtctccaaaaaaaacaaaaagggaagcagtgaagtgtggagcagagatcggaaggagagaccgggagccatgtagatacaaggggagagtgtccaggcagaggagcagaggctggaagggtgcctggtgtgttggaggagtggtggggagacccggggagctggcgcagagtgggcagatgagtgaaggggtgtgtgagacaagatgaggacagaggggacagaggtttattttgtgggactgcccaggccacggtggcgagtttggattttctccaagtgtactagggaggtatggaaaggttttgagcaaaggagggataggatctaatgtgcgatttcaaagggctccttgggtgctatgtgcagagtggatctcagcagtggcaggagcaggggcccaggaggggcaggtgtctggacgtggttgcccgacgtagcctgggtgtctgtgttccaggtgaacggctcccaggctggcctgcccctgactctggctggggggcacactccaggccttcttcacgcccttggccatcacagtccaggtggcacccggcctctccatgacctttcacgaatcccatgccctctgagtggcagtgcctgagacctacaccaacaccctctgtggcctgggcggggacttcagcgtggatacccaggatgacttcagcggctctgatagcacatggctctctgatgccaacagcttaatgggggcccagcccctctgtgcccaccagacaaggcagccctataccaggccttctgtggcttgctgggcacccaagatgggccctacagggcctgcagtaaggacgtggatccccaggtgcatgtggagaactgcatccatgacctctgtgccacggggggctcaagagagactctgtgtgccatactggggagctacgcccaggaaagccagcagcgcagcgttcccatgcagccctggagacacctcttggcctgcagtaagtgggtattcccagggagggtctttctcagcctgacctccccagctggcccaataccacttccaggatgtcctcctaggtcaacaccacccaaagtgacccactgcatgcctttctggctaactgttcccgcgaagaacctacctgcttaaaactctgcaataacaataacagatgacactgagtgctattgcatcagtcaggatggtctgggttatgctgaagtaacgaactaacctgaacatgacccagcatgaccaaggttgtttcttcatcactatcttcgtcacctttgtcatcatcacagtcactatcatcattaccgtcaccatcaccaccaccaccagcgtcaccatcaccaccaccaccagcctcaccaccaccaccaccaccagcattaccatcatcaccaccaccaccatcaccacaagcattaccatcatcactaccaccaccatcattgttaccacaaccacaaccatcaccaccatcaccatcatcattgttaccacagccacagccatcatcaccactaccatcaccaccatcatcaccatcaccaccatcaccatcatcatcaccaccaccaccaccatcaacatcatcatcaccatcataaccatcaccaccagcatcaccatcaccaccagcatcagcatcaccatcactactataatcaccatcaccattatcactaccaccaccatcattgttaccacaaccacaactattgtcatcaccaccaccaccaccctcaccactatcatcactgtcaccatcaccgctatcattaccatcaccatcaacaccatcacatcaccaacaacatcaccagccctaccaccatcatcatcattactatcaccacgaccaccaccaccaccattatcaccaccatgatcacgccaccagcattatcaccaccgtgaccacgccgccaccgttaatcaccgccgtgaccacgccgccaccgttatcaccgccgtgaccacgccgccaccgttatcaccgccgtgaccacgccgccaccgttatcaccgccgtgaccacgccgccaccattatgctacatcctgatgatgcctccacctcccctcctttgcctttatgacttacccttggcccccacaaccctctctccgctcccttggtcctattctggttggaaatgctccagaatagtaatgcttgctcaattatttaactcctacctgttttcttccagagctggcctgtcctccccgcagcaattacgagctctgcggctcctcctgtcctagctcttgtgccgagcctgccctgcccgacagctgcctgacaccatgccaggatggctgccagtgtgacccaggctttgtgctcagtggcatggactgcgtgcccccaatccagtgcagctgctccatggggggcaggtaccaccacccggctggggaggccttctggactggggagcgctgtgagcaattctgccactgccaggcctccacccacgccgtgtgctgctccccgtcctcctgtgggccggggcagagatgtgagaccctcaggggcatctttgggtgccacccactctcccctggcatttatcaagcaaccatgcactcacacgtcgcctcctttgaccggaagagtgttgagtttccaggcacttgcgcttctgcttttaccaagtcctgtggctcctccagctcattgcgccttttcaaggtggaaattgggaaggagaaacaagtccagcagtcccattgtgttcatttcaaagatgtaggttcatgggacccaggtttgtctgcagagagagccccgacctgatgaggtaagcactcattggcatctagagactcttgaaccgattgaagctaaaagaaatacattggctcaaactaagtaaaaatcatgtgatagcctagtgaaagtgtagagattctgggtccacagaagttccctatataccactttggctgttttggttacagaaagcctcataaaaggtaactcaaaccagtcacagactgtgttttatgatttttagactaattacataactgaaaattccagagggagatcaggcatggtttgatcagggtgctaactcagtttttcagcatttctcttggtctgtgtttctctatagcattagctttgtcctcaggctggcttttcttgtgatggcaaaataactgccaattttccagtcattaaatgtgtattccccattgtccaaaacccgaatcttttcttaccccaagtactcaacaaaaattccaatgcttcactttgattaaaccccactgagccaatcagtgcagcccagaggttttcttaagcctatctaatcctactcaggagttgtaggtgggagagatcctgcccctaccccccatctctggcagctacttcttgcagggagagagggcaaaatgggaatccacccctgtgtccctatgtcccccgaaaccagtatttcttcttaacaatcttcaaagagtgtaaatgccctggtaaacctccactctgagacctgaaacttttgtctagaacccacaggggtggatgtgttttctaggcccgagggcccctgcctacaagagttccattgttggctattggaaaacacacagccacacccctcccactccacccccttccaggaagggaaccagctttcagaattagtcatgctgtcagcgtcccacacaacgagcccattgactccaaagggcagcacagcagatggactgctattatcccagtggtacagatggggaaactgaggcccgggaaggcagacttgcttgcctaatgtcgcataaggagaaagtggctgtgctaggattggaacccaggctgtcaggttctgagcccttccctttctgtctgtgggcctactgtgtgctcccaaaaagctgtggccaaattaaggaggtggcatgtctgattcatctgtggcggggcctgggatatatagtaactctcaacaatggtgttcattagtccgggcatggaggctcacgcctgtaattccagcactttgggaggccgaggcgagtggatcacctgaggtcaggagttcgagaccagcctggccaacatggagaaaccccatctctactaaaaatacaaaaaaattgcactttaggaggctgaggcgggcagatcacctgaggtagggagttcgagaccagcctggccaacatggagaaaccccgtctctactaaaaatacaaaattagccaggcgtggtagtgcatgcctgtaatcccagctactcgggaggccgaggcaggagaatcacctgaacccgggaggcggagattgcagtgagctgagataacgccattgcactccagcctgggcaacaagagcgaaattccgtctcaaaaaaaaaaaaaaaaaaaagaatggcgttcattcatccactcattaaaaacttcctgagcacctactatgtgccagaccctgggctcagtgctggggaaacagcagtgggtggaacggtcaagatctctccatcgtggtggagctgagattccagaggagagagagacaataggcctcaccagtatgaattatatagtttgtcaggaggccgtatgcgttcgtgtcagggaagaacatacagaacaggatggggaggggcggtggtggcttccagatggaaaagatggttttaaattgagaagccaaggaaagcctccttgagaaggtgatatttgagcagaaccccaggagagaggcactcatgtgcacatctcaggggtgagtgagtcccgcaggggctggatggggcctggtgcattggacgagccacagggaggctggtgtggctggagctgagcgaggggctggggagaagagacgatgaggtcagagaggtgacggggaccagatggtgggggacttatggggctagtgaggacttcgcttttgcctggagcgaggtgcgccgaggacagggctctgagccaggtggcccctgatgggactcaggtggtcccaggctccctttggctgcaggtgggaacagactgcggtggggcagggaccagagcagggagaccagggaggaggctctgggacgtccaagctggaggggacaaaggctgggccagggtaagggcagtgggaggggagaagtggatggttctggaaatattctctggggtcttatcccctcttcaaaccctgctgactgttcctggggccctcaagtttacgtgggcccctggttttgtttttgtttttgtttttgttttttgagatggagtcttgctctgttgcccaggctggagtgcagtggcgcgatctcagctcactgcaacctctgcctgccgggttcaagctattctcctgcctcagcctccagagtagccgggattacaggcatccaccactatgcctggctaatttttatatttttagtagagacagggtttcaccatgttggtccgactggtcttgaactcctgacctcatgatccgcctggctcagcctcccaaagtgctaggattacaggcgtgagccaccacgcccggccgcccctgttgtttttagtactccgtgcactccctgcaatcacacagggtgtgtgtgcagccagacgtggggtggaatcctgactgcccgttaattaactgggtgactttccgctaaacaactaagcccgggtgccgcagtttccctaagtggaagaataactctccgcaggcagttaagtcctgcagccacaagcccccggattattggttgagaatagagagacagtcagcaatcgtaggtaaatgactcaggcccgagcaggggtgtggcgctggcgcaggctgagtgcggcactgccttcttggataccagggtgcagggggaaggggatgtggagatgggtcccggctgccagcaggctgctgggtcagtgcctccccgcagctgagggtgccagccaggatcttagaactgcagactcatggtcctgcctctgcagccaggagggagcctgccagccccagcaccagcctcagagccttggggctcccaccgttagggggctggggctgggtggccaggaggagttaagtcacccacagccaggaaggggcagagctgggacccaaggggctgtgaacggtgaactcatccaggaggaaggagaaggaagacattgtgggagggccaacaagaacacaggcaaaggaaaaatatatagacagtaaaaggaaaaatatatatagataaaatattcaatatataaactatagtaatatacataaatatagagtttcttaagttcatttaaattctgtttccttaactgttagtttacctggttctaaatttacttttccttccactttttcggtgttgttttttatcttgtgatttattattttgtgttaactttaatattacatttttaagggctgggcgcaatggctcacgcttgtaatcctagcactttgggaggaccaggcgggcggatcacttgaggtcaggagttcgagactagcctggccaacatggtgaaaccccatctctactaaaaaatgacaaaaaattagccgggtgtggtggcgggcacctgtaatcccaagctactcagaggctgagacaggagaattacttgaacctgggaggcggaggttgcacagtgagccaagatctcaccactgcactgcagcctgggtgacagagcaagacattgtcttgaaaaaatatattgtttaattgatttttttccccaacttttgagattttcgactatagaaaagtcatgtaacccgtacaatccactcaaatacccttcacatagcttcctcaattcttagtattttgcctgattcgctttatctctttatatctatgtaattttcttctgagtttctgtgtctcacttttcctgtccctatttacttgtccaggcgttttcaaaagactcagtcttctctgttgttggttgaccaataaataaatatttagcctttttctggagggagatcacaaaacaggacagagctcttcctgaatccttcaggcggattcgccctctcttcctgttctgcggaggacagtcctggggcctttgctgtgtcaaccatgccccgaggcaccccagaagctgcatctgtcgagtctgtgctgtaatcatggccttgaaggtggaaggcaggtctgagatgggaggtgacaggagcaggtctgggccggagcaaccgcaagcgcccgtctccttctctccctccctccctccctccttccctccctccctccctccatcaaaccaggcagagctggggcctggggcaccccagggagacagacctgccacctcagcaatggcttccaggtgggaatgggggtcttttagtccagacttttccagagatgctggaaacacagcttgtcctgctgtttaaatgtttgcaattattaatttttgcaatgctttgtaaaaactaaaggtacaatagttgggttccaccctgggaccgccagtttgcaatccttctcttagggactgagtcaggctggggggggggggcgggctgcagggctcccacttgaaccagaagtccctgtcccagatgtctagctccaaatgtgttccctgccctttcctgcttccctgtagttcctgcccgcacccaggacccccagccatctgcccaagccctccccacccccaccacgccgcccccactccccacatgatggggaagctggccaagacattcattcctccacaccccctgcccccatcagcagctccaccctcagcacccccacctcagctcctcctgcaaggcctccgtggatggggggtggcggtggagaaagcctttcttttataattgttttaaacctacttttatttttatttttgtagagacaagatctctctatattgcccaggctggtcttgaactcctggactcaaaggatcctccagcctcggccccccagagtgctgggattacaggcgtgagccatggtgcccagcctggtaattaacagatacttcgtgaccacccactatgcaccaggccctgttctataattcagatgaaaatccctgagaggagctgacgtgctagcaggggaggcagatagcaccacaaaaaaaaaaaaaaaaaagcaaacagaagtcaaaaggtcatagagaggtcagggggtaggtgcgatggtggtcggggaaagccacttgaacctcatggctttgagctgtccagatgcgggagaaaagagagccaggcaagggaataggcattgcaagggctcttggccagaaacatgcctggagtgatccaggaacggcaaggaggcccaggtggccggagcagagtgagtgacaacaggggttagggggaaccctgaacctcccctgagtttccctagtctgtaagatgggggtctccaaccggtggccccagggccttatccaaccactggatatttttcattctgtctacaaagtgttaagaaaacgaagttaccaacatttaaaaatcagggccgggtgcagtggcttgcacctataatccctgcgcttcgggaagccaaggtgggaggatcacttgagacccagagttcaagaccaggttgggcaacatagcgagacccccgtctctaaaaaaattaaaaaattagccaggtgtggtgacgtgcatttgtagtcccagctacaggggaggctgaggtgggagaatcacttaagcccaggagttggaggctgcagtgagccatgattggaccactacactccagcttgggcaacagagcaagaactcaccttaaaaaaaaaaaatccggaaggccgggctcggtggctcatgcctgtaatcccagcattttgggaggctgaggcaggcggatcacttgaggtcaggagttggaaaccagcctggccagcacggtgaaaccccgtctgtactaaatatacaaaaattagccgggcgtggtggcacacacctgtaatcccacctactcgagaggctgaggcacgagaattgcttgaacctggaaggcagaggttgcagtgagctgagatcgtgccactgcacttcagcctgggcgacaagagcaaaattccatctcaaaaaaaaaacaaaacaaaacaggagatttcatcataaaaatctccatttctagcttctgtgggtgagtgatgacgtcagagcagcacagaggcaggtgtcagggagcctgtggactcttggccactgtgtcacctcacatggctcctggaagccaggcggacagtgatacgtccacagccacaccatccccatggtggtgggacagggttacctgccagtgcccactcttctcccacaggtgctgagaccacagcgctgttccacaaagccccaggaagccacattaccctgtccaccggcctctctagccccatcttgcccaggaagtgggaccttggcgtatcgctgtgaccacacctcccagccggtcagcctggccgctcaggctctacctgcaaaggcaaggccccacccaaccagcacccctctcatggctgggggtgcctccaggctgccctctctagggccaggagcctgcagaaacgctcccagccttgaataaagagcaacgaaattattgaaacaaaatcaataaaagtttgaatcagggatggtataacatgctctggctttgattctgtgctttaattcagcgttcctgaaaaacttatgatgtcagaaactatctgtaggtttggtttttttcattttgcaagaattcccaggatatggagaaatcacagccactcacagccttaacaggttctttgggcccaaatgattccaaaagcaaaacgagagaaactttttcaaatatgtttattatgtatattatatacaatatattaataaaacatattacctacatgcatttaaaacataactgaagtcagattggcccagaagactcactccaaatgagacctaatccccaatagggtgcaagtgactgcacaaactctactcctcacagcccttcctaagactcagtgtgctcatcacactagggtctcagagtccttctgaccataaacccaagccccagcgccagcccaacacacacttggacgcagcatgttcacgtccagcctaggaagaatttatggttgacctggattgggtaaaaaccgtaaacgtctgtacctcagaatgtaagatcatggtgtttaaaactacagaacattcagaggttgtcagaagtctctaattgctggtcccccaggttgaaaccagcccttaggttgaaattttgacctgcaaatttttttttaaatctgaaccaaattttttaaattaaacccctttaaggtagtacattttcaagatgcaaaattcaaaaaatataagagggcacgtgataatgagtgagtctcacttccaccccaccctccagcctcccagtttccctctccagaagccatgggtatggatgccaatctccaaaaatattttattcattacaagtatatacatatgcattattttaccgctcacaaatggtagcacactgcacggtttcccaataccttgttttttttccccttagcaagctgtctgggaaatacttctgtatctaaccacgggcaggggtgttcctccaagatttttagacaacagttctccagttcaccccgttccggtgaagggcagagcaccccccgcccttcccagccaccctgtacacgcccctactcgctctcggatgcctgcagttcccaggcttcccagcagagggagacaccattccactcccaagaccaccaaggggtcgtcccagacacaagcttcaagggtctagggaagagacgctatccgcccagacacaaagaccccccttagctatactgagttggcctccgggcctccccttcctgtttctatctcctcctggacctgttgcttagagccctaccccgaggtccccccgcccggcttccttatgggaactggccccgccttaagagtggtaggagggagccttacccttgtctaggacctgggcttgacaacttgccccagggaaccacatagagaaggggtgtagcgctgggcgaacattgccctccccgatccctcagcgatgacaagtggggggtccttctctctgcccccagcaggccagtttccggaagagccttgacccaaacccccttttcctgtcctgtgctccacactcccagcagctgcttctccctggccaggccctgcagccctcctccccgcccccacggtggtgttggggtcgcctggagtccagctggtgtccagggcagagctacccctttcctggccctacccctccccgtgaccccaatcctccgccaaccgctcaaaggatccttgttctccatccagcccccagacaaaagtccctctgtctaagaaggcggaattgaggggagggggcacccccaactgggaccatgggggagcctgcacagaccccatccggaaggaatgcctggaggaggaggagcaggagacaggggaggaaagggggagggaggcttgtacagtgctgggggccttatgtggactaggaggcagccgcccccaccagcacccactctgtagacccaggcgtctggctcccagcacccacggaaagagcctggctaggaaactgcagcctggtgcctggcagacagttctcattctccccagggcagggagcaggttatgaccaggactaaggtcccagagtccccaccctgacccctccctgctgttccagccgctccctcatatccacccctgccccatctcctgactttggtcacgctagcatcttctgctgatcctgaaattgtaccagcggcaagatgtggcctggaaggggactttaagttctccacaactgccagcaatccttccaccaggcaaaacacatcatctaaggaaaagaagtgaggtcggaacaccaacgcatcatctcactgcatggccctggaggctctgccgtttaaagaccccagaaccttccccattcaaggtcctctcctgggcacaggagattggagaaagctcctcccttaattccaggggccgagttccagcccatccaattctccgtctcacctgaggctgctgtggtcctggtgaccccagggagcaacctgccgcccatggctggggagggggtgaagctgtctctttaagagcaggaatggagcccctgggcctcagggcatctgacttgttttctacctgcccaggtttgcttagggcgtggcagcttcggataaacgcaggactccgcctggcagcccgatttctcccggaacctctgctcagcctggtgaaccacacaggtgagcagctggggccccttcctccaagccctccttgtctctgcccctaaattaggaagtatctacctgccccctgaccctgccccatagaagcttttatgttaaagcgcctaaaatcttgtgaaatgcttttctggagccaggagataaacggaagtcccttcccctaatgtccctttccccaccattctcctctcagggacttgttgaaccagctgaggtgagggcaggactgataagtgtggttggggtgtctgaaagactagtgtctgcatggattagggatatctgggttggggatagctgggtggaggagagggggtgcctgggtaggtaggggtatctaagtggaccaggggtgcgtagatggactggggacatctgggtggatgaggaatgctgggtggactcggggtgtccagacattgagggatctgggtggataaggagtgctgggtggactcggggtgtccagacattgagggatctggattctggagacctccaggaaaaaaggatggagctgctgggggaagctttaaatggggagttgcttgggagatttcaggagcacacagcgggcaggatctttctacccacccctgaacatgagaccattctcccatggtatggaggaatagaggggatagcagagggcaggtgggggaaacagtcctcaggccggccttgggacctcatggccaggaaggatgagagcaggtagacagagcatcagctgcagggctgccttcctctctaacctgctcaccaaccacatcagttcgggagcagcccacagcctcttcagacaacagcctgaatggggaacgtgagggcagacccagctcccggctccctgcagcctccggaagcatgggactggacgttgttttgcagaggctggggcgaggaggataccatctgtcagtcttggctggatgacatcatgggaagggggtatagtggggccttgcaggccagaggtggcttggaggagcccctggaaagaggcttaagaggtgagactcaacagccatggcgacagagcatagggctttaagatgaatttgcaggggttacaggattacaactgcaatgtgggctaataatagtgccccctgcattaagctgcagagattgagcgagtaagtgggaagctgagaaaatgcccccatggggtagacactcaataagcatctgctgttattaccaggactcgtatggtcatgggtgacagcttcagaccacaggcagtccacctacaacctgtgcccctatccaacatgccatcctgcccacccacccacgccagctcccccaacccccaacacttttggggatcctaaacacttcctgggcctcagtaatgctccccaaagcctcaggctttcttcccgcaaaaaaaggaaaagaaatggatgctccaactaaaattgtgagttcagcatgtggaattaactgggaagctgagaggattcccaggccctggggtgccaggcagagggaggagtctgtgccaacctgcaaggaccacccgcaccgttggttgcgggcaccaccctctctcagcatttttgctgttcgtgaaatgaggacatagtggacgacgtcggggattgctggggggttaagtgagtgagaacacggcaaggtcagtgtgcactccagggcaaggtggaggaagtgccagctctcgctatcaaaattataactaggccaggcgtggtggctcacacctgtaatcccagcactgagggaggccggggtgggtggatcacctgaggtcaggagttggagaccagcctggccaacacagtgaaaccctggctctaccaaaaatgcaaaaattagccgagactggtggcacacgcctgtagtctcagctactcaggaggctgaggcaggagaatcacttgaacccaggaggcagaggttgcagtgagctgagattatgccattgcactccagcctgggtgacagagtgaaactccgcctcaaaaaaaaaaaaaaaaaaaacaattatgataactatgcactcagcatttgggcagggacagggcagggacagggcaggggagggcatgctcggaggccagggcttggtgcagccttgcaggctggtgagagggcaggactgatgccaggtcaggaaggagagagaaacgagttccttatgctgagcaggtctacctgggaaagagaaagtgtttgctgtcaccaggaactctgctgggcctagggtagggtcaggggctgggctggggaccccggctaggcagagccagggctgggaccgggaagggcatgggtgtgggatgaggggcaggaggttcgggggaacagagatggagctagggctgcagccaggaggtagagtccccctctacccccagtcccagcctcacgtcaattcctccacacaccaccccacccccaagcagcttgaagaacctgctcagtcctcagcctgaagtctgcaatgtcctggcagggccgggcaggctctgagcggtctacggagacactcctgggaagcgggcctcctgccgcctggctcccaatgccccgcttccccaaacaccccaaggccctgacagtccctagttaggagcagctgctggggagccaggcctggcttaaatcctacttcctggctagagcacctagtttcacctctcagagcctcagtctccccatctgtccagtgaggacaacagcgggcagtggcgcccttgtttggttgcggggcgattcccagaaagcctgaagtccatgtccagtgagttattatggctcctcccgcctcaggcccgagtttcacccagtccccactccacggtgcagctgcggcttatctctcagcccagcgagatgccagccttcctgtcccgggtgagctgcgcaccctgcctggggagcaggggaggagggttggggagccacaggcacagggccagcctcccggtggctctgctaaggccagacctcccgccacccctctaggccagcgctctgacatgcagaaggtgaccctgggcctgcttgtgttcctggcaggtgagtacccatcccccgtctgccttttcctctggatcccctggatgcggggatccaacctctgtctctctcctgtgcttttctacctccccgggaaggtggtaaatgttagaacagcatctccctgagggtaagaaaagtcagactagtgatagccggggatacacgagaagagctggctcacacagctggaaagtcaccgtcttccccattctctcgatctcttctttttttttggctttttttgtttttgtttttgtttttgtttttgtttttgaaagggagtctctgttgctcaggctggagtgcaatggcgcaatcacagttcactacagccttgaactcctggggtcaagcgatcctactctcttagcctcctacacagctagaatgccaggcacacgccaccatgcccagtgcatttttgattttttgcagagacgaggtctcactgtgttgcccaagctggtctcaaactcctggctgagtttgatcctcccacctcagccttccaaagtgctgggattacaggcatgagccacactgcactggccttgattgactattaaacagaaataacggaagctagagaagatgatgaaatgacaccttcaaagcactgaaagaagataactgccctgccagttctctaaaaacttcaagtagaaggctcagctcagtgcgactgcatctttaacttccaaacacttttcccttttttcttttcttttttttttttcggagacagagtctcgctctgttgcccaggctggagtgcagtggcatgatctcggctcactgcaacctccacctcccaggttcaagcgactctcctgcctcagcctcccaagtagctggcattacaggcgtgtgctgccatgcctggctaacttttgtatttttagaagagacaaggtttcaccatattggccaggctggtctcgaactcctgacctcaagtgatcctcctgcctcggccttccaaagttttgggattacaggcctaagccactgtgcccagcccgctttttactttttcactgcagccttgacctcccaggctcaagagatccttccacgtcagcctcccaaagctctgggattacaggcacactttttgtccattacatagggcaagaccagtattccctgcagggtagtgatctaaaattacattttcaataaagtctatttaagtgtataatagtgagtcattttcaatgatgtgcaaacaccagaccaggtgggtgtggacatggtggaagcgggaggatgggctttgagcatgattggacttggggaaacaggaatctgggaactgaaaccatctgtcgtcttgaccagaaaagtcccccgctgctgcaggaggcatggattaaccacgtgtctggaaacatgagaccaaatagtggctaaaaacctcctagattagaacccatttcaggtggcagaatgctggcgtgactcggaggtgtggggctgagtgggcgagtccacatttcctcgttgggatatgaggggatgaggtggctgctcagtgacaggacccctgtcccgcaggagaccctttcccaaggcccctgaaactccccaggccctgcccaaaggcttggctgaggccggcatcaccatctcccctccttcccctcttctcccactaggctttcctgtcctggacgccaatgacctagaaggtgagtcagactggactctcacccgtcacacccccaaattctcccctgggtggggaaggcctgcatcctggctgtaatcctggattcatgatcttttttctttccttgcagataaaaacagtcctttctactatggtgagagcccgtgccccctttcccctccccacaaccccacatactgcttggtgccaagggttcccatacagggttggggcctgacgtgagcatcacaggacaaagatacgaagggactaggatggggttactgaatatgccacacagtggattaaaggaactagaggcagcaacctggcctttgggaaggttctattccagcaagatagacacacgcaggaggtgaggacagtttgcaagaagccattggttggttcagatcaactgctgggagaagtgttgacttgagaaaacttcctggaggtggtgagctattggatcaaaaccctcatctggcctccaggttccaatgacctgctccctactccccgctctgccctcacctctccacgctcctcattccttctgctccaagcctctcagacacagcagacatactgccagcctcagacctctgcacctgctggttcctctgcctggaacacttccttccacagaaccacatggctccctcccttccctctgctcaaatgcagccccctgagaggccttccctgacaactccctctaaaagagctgccatctgactttttttttgttttagagacagcgtctcacactgttgcccaagctggagtgctgtggtgtaatcatagctcactgcagcctcaaactcctggtctcaagcgatcctcctgcctcagcctcctgaatagctgggactgcaggcatacaccaccatgcctggctaatttttgtatactttgtagagatgggttctcactatgttgctcaagctggtctagaactcctgaactcctgaagtcccaaagcactgggattatattaggttggttcaaaagtaattgtggtttttgcaactgcttttaatggcaaaaatgcaattttttttttttgaggcagaattttgctctttcacccagagtgtgactggctggagtgcaatggtgcaatcttggctcactgcaacctctgcctcccgggttcaaatgattctccagcctcagcctgctgagtagctgggattacaggcgcctaccaccatgcctggctaatttttgtatttttagtaaagacggggtttcaccatgttggccaggctggtctggaactcctgacctcaggtgatccgcccaccttggcctcccaaagtgctgggatatcaggcgtgagccaccatgtctagccaaaaacgcaatcacttttgctccaacctaataggtgtcagccactatgcccagcccgccctctgactttccatctcccaccccacttatttttcttcaaaccacttatctctgcctgaccctgcacgacagatcgtgtttgctggtgtgtgaaccagaatgtgagcacctgggattttgtctgttttcttatggcggtgtccccagcaccctgtgcatcctaggtgctccatatatatttgtcaagagaatggggggacagatggagaggacacaggctggcactgaggtcccctccactttcctcctagactggcacagcctccaggttggcgggctcatctgcgctggggttctgtgcgccatgggcatcatcatcgtcatgagtgagtggaggagctcgggggagcaggcgggccggggctggggctcccctcccctgaccactcagctctccccaacaggtgcaaaatgcaaatgcaagtttggccagaagtccgggtaagatactgttccggcatgcccgcctcaggctgactggacgcttttcagggtgaaagggctaactctcccagcaggagaggcctcggggctctgccctttagagttcctgccgctaagatttccaggtttattgtttctagctggtaatccccagggggccccaaatcctgaaatgctttggcccctgggattgcacaaccccccaaatggaaaggcagccaggaagacatgtctgggcaggctaagaaccctctatccggagggagagggcaaatgggggcggacaccaatctcaccacttttgtctccttagtcaccatccaggggagactccacctctcatcaccccaggtaagatggggcagcatggggctcaggggaacacggaagtggtgtgtgtgtgtgtgtgtatgtgtgtgtttgcacactggaaagaaaagaactcaatccaccctcacaaacggaccccatcacttcccgcaggctcagcccaaagctgatgaggacagaccagctgaaattgggtggaggaccgttctctgtccccaggtcctgtctctgcacagaaacttgaactccaggatggaattcttcctcctctgctgggactcctttgcatggcagggcctcatctcacctctcgcaagagggtctctttgttcaattttttttaatctaaaatgattgtgcctctgcccaagcagcctggagacttcctatgtgtgcattggggtggggcttggggcaccatgagaaggttggcgtgccctggaggctgacacagaggctggcactgagcctgcttgttgggaaaagcccacaggcctgttcccttgtggcttgggacatggcacaggcccgccctctgcctcctcagccatgggaacctcatatgcaatttgggatttactagtagccaaaaggaatgaaagagagctctaaccagatggaacactggaacattccagtggaccctggaccattccaggaaaactgggacataggatcgtcccgctatgatggaagtgttcagacagtttataatagtaagcccctgtgaccctctcacttaccccgagacctcactttattacaagatctttccaaatacccaaatgtccctgcaagcccgttaaataattccctatgctacccttaataacatacaatgaccacatagtgtgagaacttccaacaagcctcaaagtcccttgagactccccaatacctaataaggcatgcgaaatgttctcatgaactaccccacaacacgcctaaaactcaaaacacccaaaaatatctcctccaatgtcctgaaacatgaacccaaaaagagacccacaataaactcgtgacttgtcccctcatcatgccgttttatccctcaaacatcccctgagtccctccataaccacgaacccacactcagagaccatgaactgcggaaacgcctccctgggacctgggccgctccgagcactgctccagggacaccatccccgccctgtgccgttcacaggacatcctctcccaaggatccacaacactgggcggggagggtgcacagcgcatttattgagctcggactcgtcttgtccttgcctccgtcgcccatctagaagggcaccaggctccccgcgacacctcccgctgtccctccctgtgccccggcgcacgcgcaagaggcgcaaaaggcacagcttgctgggcggccgcacgcatgcgcacaagcagcagaggggaacccgcccagtgctgagttgtcttcgaggttggcgctcctccaggaaagcgattggctgcgtggagtttagaatgggaaaggaatgccatcaacccctcggtgctttcagagggaccagcggggtaggagcgggttgagaggggggctccgggacctcatggagctctgcacgtgacctccacctcgactccatgcagtgcaccagcctgcaccccccaggttgcctttgatggggaatctgccccagccgagatgtccagatgttgctttagacctgaagggcagctcgggaggtccagtaggctgggaccctctatgtccccccatgggtgcagatcctttaagaagtgggcttaaggcctagacgtgtggctgatgaacgtggcccacggtcagcagctcacaggcgggccatcaccccaagtagggccaggagccagccaaggggccgtccaggggccccagccatgcccagagtcccgttggtggtctcaggcactgaggtcgatctcgtgatgctggtagatctgtgtggggcccttaaagcaagcagcaaagaggaagcgtctgccggccatagtgatgtgggcaaaggcacggggggccaccagggccggaggccccagctcctgcagtggctccaggagccccttgtcaggctcaaggcggaggacctggctgaaggcgaagtcgctgcctaggatggccagctggtccctggcgatgagcagtggctggaagacgtgggcaccgcgcgagggaagttgctgcagcagacgaaacatggagccgtcccagcgcatgacctgtgggggtgtggccagtgagggcctggggtcccgggggtctctgggggccgtggaacagcttggaagcagaagcctgtcggtcccaaaactcccatagctttcttatcttcataaaagtcaccacccacctgttcggccacacacatgcagttgttctgagcccttcccttgccctcacgccccacacagaagcactcagccatggactctgtcagtttcaccttctacagttgtacatttctcccaccacctctggctgaactccatcccctcctgactggaccatcctggcagcctcttccctggcctctaggctcctctccctgctcccccagtctgttccccacccagagaccttgtgaacacctgagtcagatcagggcccttccagactcagaaccctcccctgcctgcacctcactccagaaacagtgggcagtgcttaaccctagcatcagccttgggggctcagtgtcagggtggggacaggtgtggctgtggtgaagtctggaatgcatccgagtcacagagccagcatttgggggtagaatcaggatgttggggccagcatcagtgtcggggactggggagtggttcggagtcagccagccttgagggggtcagagtcttggcatcagtgtggggtggggtcctggttcaaaggtcggcatgtgagggtaggtcagagtttagaggcttagtgtgcaagattgggtcagtgctgaaaagccagccccccgcccccaggcccagcctcaccatggagtccccaatgtagcgtgtgaggcacaggaacacgtccccaccagcctggaagtggcgtgtggcatagacatcctcggcctcggggatgtctgtgcgtctctcgaagcggccaccggtccagtggaagagcacgggccgctgggaagccgaggccagcagcaggtggggccggccgtccagctccagggcctcagcgtccgtgtcccggtgccaggcgtgcaggctctggtgcgggtaaaagccgggcccgtcgcggcacagcagcgtggtgctgcccgccttggaggcatcggccaccacgaagcagggttgcccttccagccacaggagctcggcgtcattgggccgcagcagccgccgcggggccagggtctgcgttggggccaggcgcaggccgggactgggccgggcccacagctgtgagcccccccacaggcgggcagccagcacgaagaggctcgggcccagcaccagtggcttgcaggacaccacggaggccgctgtggggaggtggggaggcaggtcaggccagccaggcaggctgctggacaggcagaaggacggggagggggctcaccgggcagctcttcctcgggccggaagcgctgcaggctgtagtcccaggagagaatcaggcagcggccggcgaagggctgtgccagcacaatgtgaggctccccttggtaggagaagggctctacgctcagtgccgactcccccaccgtctggaaccaggacagctctgtgggtggagaagagagtcaggcaggccccaggacccccagggtcctcattgctgagcctcagtttgcctacatctctgaaatggaggccattcatggtacccccctcatagggacatataactggaatcttgatctgtagatgtttgtttggtttgggtcgaggggtattttgttttgttttgagacagggtcccactgtgtctcccaggctgaagtgcagtggcacaatcatagctcaatgcagcctccaccttctaggctcaagcaatcctccttcctcagcctcttaagctgagactacaggtgtgtgctaccatggctggctatttttttattttttgcagagatggagtcttgctatgttgcccaggttggtctggaattcctaggctcaagagatcctcctgccttgacctcccaaagtgctgggattacagacatgagccacctccacctcctgggttcaaacaattctacttcctcagcctcccgagtagctggaattacaggcgcccgctaccacgcccagctaatttttgtatttttagtagagatggggtttcaccatgttggccaggcttgtctcgaactcctgacctcataatctgcccgcctcggcctcccaaagtgctgggattacaagcgtgaggcaccgtgcccggcccataaatcttattttctaagctgtgtggcatcaccaaataatcccttagaaacagcatctggattaattcatttaacttcacaacatccctgtgaggtacattctgtgatgatttccccttcgcagatgagaaaacaaaggctaactggcacaggcagtctgttatccaacaaaatccatccttcccaccttccaggagagaggattggagctggtcaccaggccacccagctagaggctgcattatcccgggacccccattcaccgccctcgctgaaagttagatgtggctgttttgagactgagtaaccagtggaacaagggcagatgtgatgagtgtaatgagccaccacacctggaaacagcttgtcccaacttggtctcctttcccaccacgtgggtgtgccacaacctggtttcaagcctgaaagcaaggacaatgcccagggactgccccacgtacctggacagctcactccagatccttctatccttaattcatggtattttgagagtttgtgacagcggcttggctttcattgtcactggggcaccaaggctgctccgcttgttagtaggggagctgggcagttgactccaggctgtaatatttcactctgcgtgccaggccctgtttccaggtgccagcgttgaagcaatgagccaaactacatataatgcccacctaaagggcgaatcttttttaaatggctatcaaatcacctcttgctcaaaactctcagccgagagtggtggctcacgcctgtaatccccacattttgggaagccaaggcagatggatcagtagagcccaggagttcgagagcagcctggacaacatggtgaaaaccccatctctacaaaaaatacaaaaaattagcaggcatggtggtggtgcacctgtagccccagctaccagggaggctggggcaggaggatcacctgagcctggggaggtcaaggcctcagtgagccgtgattgtaccactgaactccagcctgggcgacagagtgagatcctgtttcaaataaacaaacaaacatacaaaaaactttctattcttgccatggcccagaataaagtctcctctcctctctgtggcttccaaaatccatacctgtccctccactcactacccctgagccacacctgccttcgtttgatcttcaaacagggcacactgtatgctgcctcagggccaccggccaggctgttccctctctctgaagagcccttccctctgttcctcacttagccacatcgagacctaacatccccacttgagagaagccttctctgactcccataggaaccctcattctctcatcactccttgtagttatcacaacgtatagcacacattgatctgtgccgtgtttgttaaatgtccatctccccaaactcccaggactgtaagtcccgtaaggccacggctcaggtcgcaaccacagtgaccatcacctctcacagggctgggcactgagtggacttcagtgaacatttgttggataacttgaatgaagagggactccctaagttaaatccccttcttctatgtgtcccacagaccaaaaacatgtctttcttacacttagaataataataattatatgctgataataattatgtatgcatatataattatatatatattatatatacatgttgtgggggaaaggaagagagatcagactgttactgtgtctatgcagaaaaaggaagacataagaaactccattttgatttgtactaagaaaaattcttctgctttgagatgctgttaatttatgaacttagccccaaccctgtgctcacagaaacatgtgctatattgactcatggtttaatgaatttagggctatgcaggacgtgctttgttaaaatgtgtttgcaggcagtatgcttggtaaaagtcattgccattctccattctcgattagccggggacacaatgcactgtggaaggccgcagggacctctgcccaagaaagcctgggtattgtccaaggtttccctgcactgagacagcctaagatatggcctcgtgggaagggaaagaccttactgtcccccagcccgacacctgtaaaggatctgtgctgaggagtattggtgaaagaggaaggtctctttgcagttgagattagaggaaggcatctgtctcctgctcgtccctgggaacggaatgtctcggtgtaaaacccgatcgtacattctgtttactgagatagaaaaccgccttatggctggaggtgagacatgctggcggcaatactgctcagctactctttactgcactgagatgtttgtgtaaagttaaacataaatctggcctacgtgcacatccaggcacagtacctttccttaaacttatttatgacacagagtcctttgctcacatgttttcctgctgaccctctccccaccattaccctatagtcctgccacatccccctcgctgagatagtacagatagtgatcaataaatactgagagaactcagggaccagtgccggcgcgggtcctcacttgctgagtgccagtcccctgggcccacttttcttcctctatactttgtctgtgtgtcttatttcttttctcagtctctcttctccaccttgcgagaaatacccacaggtgtggaggggcaggtccccttcatattgttatagataataataattattgctgttgttattgtattcatagcatctgtggccgggtgtggtggcacatgcttgtaatcccagcactttgggaggctgaggtaggaagatcacttgaagccagaagttcaagaccagcctaggcaacgtagcatctcccagaccctatctctacaaaaaagttttttaaaaaaattagccaggcacagtaacatatgcctgtagtcccagctatttgtcaggcttaggcaggaggatctcttgagcacaggagtttgaggctgcagtgagctatgatggcgccattgcactccagcctgggcaagagaatgagaccccaactcttagaaaagaagagcatctgtgtaaagacccttcaggcttaaactccttcaggaagcccttcctgtccccccagctctgtgtggccctggccctgactctgggctccctcagctcccacagctttccccatccctgccctgacccctctggctgggcctccccatcctgcccagatcgtcctgggctgtcctgtctgggcctgcattcctctggactttgaactctttgagggcgagacccagggctggcctcatcattctgtgctctctgcactgcccagtatcctaaaaggcaacaaaatctatttatagaaaaggcgagtcaatgtaaaggaggtgacattgcacctgcagttcttagcgcaatacttggcacttaacgaagaatttttaaattggttgcttttatgttaacaagggtgaacgtttataaggacctcctgtcccaggcccggcgccaaatgccgaacacgtgaagatgtatcattgaattcccatggcactcctatatcactgtttattacccccactttacagatgagaaaactggggctcaggaaggcagtgctgcttgctcagggtcttcccactccgggaaatggcagggcagggagtgagacgagcctcttggccctggcagcctttcccccagatctcccgcctcccaccccatcgggaaagccccccacctatggctctgcacttgaaagtcttggggtcgaggtggtggagctgcatgtggctcagggaggcggggcccgcacaggcgccggtccccacgctggcattcacggtgggcatccactgcaggagccagaggacgcggcagtcacactggaacgggttcccgcggaggtccctggggcaagaggccagggaggggctgcgacccggcttccacgccctgggggccatgctcctgcccccacctcaggcaagtgtccccagagatggggccccatagtggtaagaaaaatacgtaagaaccactgcagccaaatgcatgcacgccaaccagaagtgggcacggatgccccccgccgacacaaacattccccaaccccccacattcccagcccccatgagcctcacacatgagtaagggtgtccaggcctcggaacaggaatctggggagggtctccagatggttattggccaggcttctggtggaggaagagaaggcaccgtcagcagccacaaggataccctgtgttccctggggggtggagcatgggtgcctctcatggagggctggggcggtggaggcacgcacaggtgtgtaagcgagcgaagtcctctgagggcattcttagagatggagccaatctcattgtcctcgatgaagctgtggagggaagctggggtcagggggaggcccgctgagcttcagggaacgcaccccatgaaagacataggcccactggaaggtgctgaattctcttccaataccacggacaatcccagggaaagcctctcaaaaacctctcctcccaaagtcccagccatcaattctaggagccatgaaactggccccatagtcattgccagtttcactgtgaacattgtcctgctgccaccaccacaatcaccatcaccagtgctgacacccaaatcaccaatacctccagcatcattggtaatgaccaacaccaatgccagcatccccaacacccatgtctttatcactgtcatcaaccccaggaccaataactgccattatccccaacaccataccctgccaccaccatcaccaccaccagtgctagcacccacaccaccacattacctccagcatcatctgtaatgaccaacccaatgccagcatccccaacacccatgtctgttaccatcatcaaccccaagaccaataactgctgttatccccaacattataccttgccactatcatcaccaacactagcatcattgtcaccaataacatcaccacccactcccatcaacaccatcaccaatatcatcattaccaaactccacaccaacaacactaataatcatcaccaacaacacaatcttcatgatcaacaccaaaaagattgccacccgcatctccaatgcagcactatcacacacatcagcatgagcgccaccaacactgccaacactcacatctccattatgcccaagatgcacatattcacccaccaccagtactaccactgccggagtttccataaataccaacaccttcaccatcatcaccaacccagtaccaacaacattgccattcataccaaccccaacatcctacccacagccatcaccaacatcaacaccaatactgtaatgacccacccccacaacattgataattatcacagacacgagccccaagaacttcatcagtgatttcatccatagcatcatcaccactggggctaccatttttaccaacatcatccccactccatcatcatcaataatgccaccaatcccatgtcagcagcagcaacagggtcatcaccactgccattatcatcaacgccatgacccacaccaatgccagcattgtcatgctgtgactgccaccgctgccaccatcaccaccactacccaatcgtcagcaccaccctcaacaccaccacagtatcaccaccactacctaattcagagttgtttcctggtcatttgaaacgtttcttgtctctgacttctgtacacccttcctgggtttctatgagtcagggagagccagaatcaggctctggttatccgggccctttgtagatcttgaagcagagaagtgaggtgataatcaacactgataaacatcattgacaccagccctgagaacttcatcagtatcacccaaagcatcatcaccattgggttcgccatttttatcaacaccatcccaccatgatgtccaaacacctgctcctcagggccacagctcccatctccccctactctgggagccacagaagggtccctccttgcccagacccacctgcctccatcccctggcctcactcacaggtactgcaggtgggacaggcccgcaaatgcatcgtcctcaatcacggagaaggagttggaggtgaagaggctggcaagggggcaagaaagaaatttttccagaattgcagcccccatctgacattttaaccctggcctccaccctcagcctaggtgggcatgggcacgcaggtgtgagtatgtgcatggacacaaatgcttttgtacagacgtgtgcatacacccccacacacgtgcatcaatgcccacctgacatctgtgtgagcatacactcccacacatgtgcataaacgcacactcccttgagctggttgtcggcccagccaggccccactcacagcaggtgcagagacggaattctcaggaagctgccggccttcagctgggtgactcccgtcctgacgagtgagctggggatgtgggcagtggtaggtgagagggacaccacagcaatactccagttgcaaaccagaaccttctgccatccgggagaccccagcgtgccaccctgaccctggatgtgtctcccctgcatgccagaggaggcaggcatttgccctcctggcttgacaaggaccctgacagcactcaaccctcctcctgggccccaaatgctgtccctgccctctggggtttccttctgctccttcccagatgccagcacccctcttcaaggcatcccgacaggctttgctgcccatctcctgagatcctgatgggcccctgtttccctggagacccggcaccacatcccaacctctggggtcccaggacttccgtccccaccttcgggcatgcagaaggctggacactcacagtgacagcagggtcggagagaagctgacgggcaggtccggggagccctcacacagggcgctgtctttagagcaggagcagcgcaggggacactttccctttgggggtctccaggccaccaccacccccgccccagccagcagcagcagcagaatgcctgcccctcccatgcccccacccccactctgaggcacccgcttctcccggcccacccagctcagcccaggccactacgtctcctcctccaccaggccgccctccatccgcctgctggcacgctcggccctggcttctctctcctcttctccgtctttctttcagtcggccttcctccctgttcgtatgtctttggtgtctaattttctgtttctctttctccctgtctttctgtctctgtatttttgactctgtgtgttagtctgtttctatttctgtctttgtctctctttctgcctgtttctttttttctgtgttgctgtcagtctttcaggctttaggtagctgtctatctgttggtctctatgtgtgtgagtgtatgtgagtgtgtgtgtgtcctgctgcctggtgtcttgatttcttgtctcctgccccccccacccccccttccagctccctgcctgtagtttctttgcctcctcccacctcccttctccccgaaggtttgggaaaggggttcgctggacacccggcacacccggcagagtaggatgggaaggaggagggggtcagaggccatgagaaggtcggccttgggggaagggactggacagccccacaggagggggaggggccaccaagggctggagccgccccaccactcccgccagccccctccccagattccccactcaaccctattgggggagcaggaggacgatgtcaccagggtggggaccagatggctctgcattctggagcagggtgggaggagaggccctgggggggctggggacatcccgtcctggccactctctgccagccccctcccctggctacaggagggtgtgttgggcgctgtcagtggggccagatcacgtccagctgctccctctggtggtcatactcggcaggacctctgcccggccccaagcccttagcctccctcccctaccctgaaattaaccctctagtggccaacacccactgggggacagcaccaacccgaggacatgatgatgatgaagatgatgatgatggtgaagatgatgatgatgatgccaccccttcttcagcgtctactctgagcctggccttgtcctaaaagctcatctattaactcattctgatcttgccaaagccctctgaagttagtgctgtcatcatcaccactttacagctggaggaagtggagacagaggtcagggaacctgaactctaggttacccagctgagggcacagccgggattcaaacccaggcatccggctccaggttattttgcattctttctttggagatcagagttcatggatagatggataattggttgttttaatctggactaaattttagtcatttggatagattctgtccactaaataagaaacataagtaaatgacacttgttagctaagatgaaatagtagtaatgtttatactcactcagccttcacagccaccctgtgagatgggcagtactgctatccctgctttacagatggggaaactgaggcacagggaagttatgtgattagtttcctggctctagtcagctctaaacctaacccctaggctgtaccacctcatcgcctggggacgagactcatcctgtgattgaggaatgcatgcagcctctcttgacactgacgcccacgcccagaagcctcgttggaggataagggggcttaacagcttggaggtcatgcagatctgggttccaggcccagtcctgtgtggcctcagttttcccatctgtcaaacggggacaatcgtggcacccgcttcccagttgtggagaggactcaggtgatggaggcaactcatccttttggggttcagcacaaggtgggcatcccacagtggtcggcaagcttgggggtgggctccggatccagctcctagaggagcagaccccagcagcttgtggtttgagccatgcccgtcagctctcagtttccttcactgactattgggtatgataaacagggtccctgaaagtgaagttggagagctgagtgccaggggcacagagggatctgaacccactctcatagggtgcccagcccagcagtccagttcacaaggaggaggatgacaaggacaataataataggccaggcacggtggctcatttctgtaatcccacattttggcaggctgaagtgggaggatcgcttggggccaggagttcaagacaagcctgggcaacatagagaaaccccgactgtacaaaaaattaaaaaattagccaggcatggtgtcgcacgcccatagtcccagctactcaggaagctgaggtgggagaatcacttgagcccatgaggttgaggctacagtgagctatgattgtgccattgcacttcagcctgggtgacagagcaagacccggtctcaaacaaacaaacaaaaaatgaagttaatcataagacaatgtcaagttcagagacctctgagccctgtccaggattatacacgtgatcttagtgatttttccattttggagcatgtgaaaatgaggcacagagctgctcaagttcacacaaccaggagtgcagtgcctgggccattccaggtttccctgtcaccaggacctgtaaacctggcctgcccatggggacgccaggtgtgttgtccccgacaagagctcaggggaaggaaagtgtggggttaaatacatatctgtggttttggaatgtgtgaacatgcaagtgtgtcagcctgcgcatctgtcaccgtggccaaccatgtgcctgtttgctcaagcatagggtgtgaaccagtgtgtgtgtttctgcttttgtgggtatgtgtgagagcggcgggttgtccttgatggtgtttctgcttgtgtatctgtgcccatggaaatctgtctgtgtgtacacaagcttgttggccttcctatctttgggaccatgtaggagtgctggctgcatgtctgtacctttggggtttttttgttttgtttttgtttttgagacagagtctcgctctgttgcccaggctagagtgcagtggcatgatctcagctcactgcaagctctgcctcccgggctcaagtgactctcctgcctcagcctccggagtagccgtgattacaggcgcacgccaccacacccagctaatttttgtatatttttttagtagagacgagctctcgtcgggttggccaggctggtgttgaactcctggcctcaagtgatcctcccgccttggcctcccaaagtgctgggagtacaggtgtgagccaccgtacctggccatgtttggccatgcatcttagaatgcatttatgtgcggtgtgcacatacttgtgtgtttctgtatggccatttgtgggtgggtcttcacataaacatgcatttttgtggccagtttgtgagtgtagatggtgatgtggctatgtctttgactgtatctctgtgtggccatccatctacatgagcgtgcgtgggtctgtgtagacataaatgtgcttgttctggtattttgtgactggcataaaaggtgttggctgtgtgtccgggtctttgggtttctctatcagtgtgtcattctgtgtgtgtctgcttctatggatgtacatacatacatggttttgtctggttttgtacctgtatatctgggtctttgggattgtgtgtgggtgtgtgtgtgtggtgcatttctggggatctcaccacagcagatagcgcacatgcgcgcgcacacacacacacacacacacacctccctcccgtcctctaaaacagccctgttaaggacctcacggagcactgggatcgggggtcagtgggctcctgggcagtcaggctgggtgaccttcggccctggctggacccagttcccagggggcagccgcctcagcccaaaagctcttggaggcgtgtgtgtttgtgtgtgtgtgtgttcacaaccctgtcctccacaatcctcctagcctctccagcctgcctgctggctgcctgctgctgctctctctgaactgagagagttaaccaagcgggccagggcagtctgggctgggggccgccccctggcccccctccagccccagctccagtttcagctgctggttggggagggcatgggtggggtggggctgggaggggaggctgctgggggcggcgcgtccagctctgggccagggggtccaaagtgctcagcccccggggcacagcaggacgtttgggggccttctttcagcaggggacagcccgattggggtgagcgtcccccactccttccctccaggcctcacccctggtctggctgggccgcctattttgggagcaggagtggccagcccgaggcttcccaggcaggccaacccaagagggagggagtgtggttgaggcagtgggttctgcagggtgggatgtgggtgactcctccctgccctgctggtgcgtgtgcaccctggcagggtgtggagttgggacacacacgtgtgtagggctggttgcgtcactgcgtgggggcaccggaggcccagaggaggagtattggatgcctgacggtgtttacaccccacgtcctgctccaaccagcagtttggggagaggttgttgttcatgtccattccggccccactgtgtgtgtgtgtgtgtgtgtgtgtgtgtgtgtgtgtgtgtatccctgccccagcatgtgttttctatctctaaggcccactgggctgggcctcatgtcacttgcctgacatccgattgtgaaagatgtcacccagaggcgggcagaggggctgtcttttccttttctcgttgctgcccagggaggagacggggtgacctttcccacaggggcagcctgtggcgatgtggcagctgggcctcaccccggcagggctgtgcgtgaccccctgagtgggggaaggcaggctgttgccatggtggcctgagcgagcagaattcctccagggtgaagtgggagatatttatacccggggtcaggccgcgagcgggcgggcggagagggcagggagctgggatttcgcggggcacagtgaggccgggcatgtaggcaggtgggacttgggcgtgccctgctgtctcctgctctgtgtttgtgtgaggcagcgcctcctctgccctgccagggtaggtctgggaatcgggggcctgctgcgggaggtggaggcccaagggaggccccccggggactgtgtgtctcacccccgtccctgctacgttgtgttgttgtgtgatcccatcgtggaggttgttttggtgacactgtgtccccacgaagctggggatacccgtttctctagcttggagccaccaagatagaggacaaacacttctgtgattcagtccccagactgtctctgacttaatcccttgggttcaagccctatgtgggagagcaagggcacacactgcctaatccgtggtgtcccccccaggacaatggcgtctcttggccacatcttggttttctgtgtgggtctcctcaccatggccaaggcaggtgagtgcaggggaggctgcccgctacccacctcagccccaggggtggcggtggggaccgaagaaccaagttggagaccccaacctagactaagtcggctggggtaccaagaagtttgggggtctccacgtggggtccagtcacaggctggtatttgggggaggggagaggaagccccagatcaggcaaagatggggtgggatggggctgaatccccgatgggataactgggtcacagacagcctgccgtgagtcagggagctggggcagttaggtgccacctgccccatctgggacagtgcagagggggcagctgggacccagagagtgtgggcagcctgcccagacaccctcagactctaagcccagcaaggcagagcctccagtggtctcctcatgcccctccctgccaggaccccaggaagcattcaacccctgatttctctctctttccagaaagtccaaaggaacacgacccgttcacttacggtgagcggggggtctaattttgagtcctgggggagagcctggctttgctggtcctttgattccccctcgccctcccccagagtcccagtattgatatctctgtcattctccttccctctattttgtccttcctctctgattccacctgtctgcatcttttcctgtctgtgtctatctgtgtcactgtctatgtgatacctctctggttctctttctcttgcctgcgtctgtctcagcatctcgtggcccatcctctgcttcttcccgtcttctctcccccctgtcctcctcctccctgtcccctccctccctttcctatacacccctttcctctccctggtaccccactttcctcctcccatatctgctcccccttaattatcttacttccccccttctgcctgctggtcctttctccctgttccctccttcccaatttacccctctcctattctccctcctgtcttccctgccctcaccttccctgctctgctgctcacagactaccagtccctgcagatcggaggcctcgtcatcgccgggatcctcttcatcctgggcatcctcatcgtgctgagtgagtgcccctagctcccgccctctaccccgcctctccctggccccacctctctctggccccgcctctccctggccccgcctctccctagcccccctctccctggccccgcttctccctggtcccgcccctccctggccccgccccgccccaacccctcccaggccttgccccgcctaccctgccttggttccccggcccccggtctcgcctctagccccgccccgtcccccaagccccgcccctcgcgagggcgagctggagctacagcgccgcttggcgcccgccgggagggagcctcagcttctcctacctctccacgcccacaggcagaagatgccggtgcaagttcaaccagcagcagaggtaagacgcccctccccgccctccttcgcccgctcctgctctggagggcgccgcgggtgaggcggggagtacccctgacccgcagcccgatccccgtcagcgactatgtattaagcacctactatgtgccatggcccaagcctggccctgggaccaagcgaggaaaaaacctcccgcccttcctggccgagctcccagcctagtggaggcggtggccgtgggttccaacagccccacagatagaaaaatcacaaagcgtgataacacaaagtgcaggaaagaagaaacggcggtgaaatgagatcatctcacacgcggcccagtttagcttagagtcttgttcctagctctttgattcctcttcgaataaaatgttaaagcatggacaatgtatgaatatgttagaacaattatagatattatcataagtagtagctaatatttactgggtgtgtaccacgtgttagatacggtttcacttcctctgggagggaggtgctgttattaaccccatttgacagatgaggaaactaaggcacagggaggtaaagtcactttgttcaagatcactcaagtggaagatggggggttctgggtttccaacccaggccatctcatggcagtctgccaagtccccatgactatccctcccccaccaacttcacatccctgcccccaaatccgcggaggtactcactgttaaccagcttagaagccccctgccagcacataagctgctcctgggtgctcctcatttctggcggaccccgagcctgctcttcgtccatatctgggcctagttacaccaatctgggaaaggaggcttgtactggggggttcctagaagggcagcctctccccctttccatcccgaaatccctctgcctctgtcttcccaggactggggaacccgatgaagaggagggaactttccgcagctccatccgccgtgagtctggggagactgcgggtattctggggagagggctggttccaaggaccgcttttcccggccctccctggctgcgtagagggaagggctggatctgaaagcggagggcggggagttgccccgccgcgggccccacctgcccaggagctggggatgcctctccagaatgacccccgatctccgtgttccccccaggtctgtccacccgcaggcggtagaaacacctggagcgatggaatccggccaggtgctgcagctctgacacggcggtgggagggaaggagggaggaaggaaaggcgggagagggagggggccaagtgccagagttgaagggcggcgaggggtggggctggacgtcccccctcgcctctcacccttttcaccctcacaggactcccctggcacctgacatctcccacgctccacctgcgcgcccaccgccccctccgccgccccttccccagccctgcccccgcagactccccctgccgccaagacttccaataaaacgtgcgttcctctcgacagcactttgtcggtctcggtccctcagcgcgaaacgccagcgccactgggccccagcagggggcgccccaccctagaggaaggggcggggacgacggtggtgggcgggggcgggggcgggggtggcctgcacgggggcgggctccccgggcccccattggctgcaggcccccccacgccagggctccccccagctcccccccacatcggtccgtcctgcttccagctgctgcagcgcgccttcgccgccaaagcatccagcagccccctgctccggcccagcatggcgaccccgacccagacccccacaaagggtgagcgtcgtttggggagggggttgcaggggggctccgggatctgagagcctaggagagagggtgtcgggagattcaagcaatggtaaggcaagggagttgggggagggaggtccgctcctcctgtgggcggaagcccctgtaatgcgcccccccgatcgcccctccgggtctctgggacaccccctccccggcaggcgtcctgtgccagacctgcggttggagagtggcagtcccgggagaagggatgctcggacaggtcgctatggcaaccgggtggctggtcccgcaccgtggtggtagcagacggggaagagatgagcttgcagggtgggagcgggtgggtctgcgaccagagacgttctggaagatttcagggtccctggggtgggcaagggaaggggaggaggttcatgtccctcttctttccagtgctgtctcctagggtgtctgtttcctgaaacccttgacagccaggttcagaggaaaggagtgagagctgaaggaagagacagagagaagggatatagcaagagacagacagggagaacctggaagagacagagaccaagagaggcaggagatccagagtcacagatacaaagacccaggaagacaaatagatggactcagagagattcccagtggaggggagaggctgagagcagtagacagagatgcagagagagagagaaaaaaaaatgagagcctgggagatagtgggattgagaccgctatggagagagaagcagagagacggagggagagagacggacccatggggagagaggggagtagaaagagaagaagggagccatgtggggtggggcccaaaccactgcagtgagaccctatgtgtgggaatggggcgatgggaccctccttccagcccacagcaggggtgttttccaatcccagaggtgctgttgggtatacacctagctgcccctactgcccccatccagccacacactgatttccattccacaccaattaacccagttatgcacccacttaaacacccacttctaccgtcgccccctaatagcccccactgctaatcctgcttctgcagatgagcaaggcacagactgcttcaagagggagccagtgcccagcaagggtctccagcactgagggcaggggaccaggggtgctgagaagcccctggcagtgaagggaacccgaattccacttggatggctccctcccttccgcgcttcccagcaggcgggggctgctgcactgagccatatctgcagaatccgaagcagggcggggggtggggggggctgcagaggctggaagctaccctagggaggggggcagggctgaggcagcaggcctggcgggagcccagggcttctttttgcagaggtggtggttagcaggatcgatggcagcagacgggcagaggtgggaggacagactcctcaacccaacctcctctgcctccccctttcccagtcacagcatgacaggggaccgcaggtctcgggaaaccccgggggaggaaaagcatgttgtgcattgcaagctgcttaaggaaactaattaatgaattgttggggagcgaggggggaagaggggagagtctccctccaccctgccagagaacaggagggagagttaggagtgaacagaagagggatgcatgagcacagctgggtccgggtccctatccctgaaatggacccttagcttggccagaagccagtcctgcaggggcaacggcaggaggtgcaaaaggaggggagagggtcaagattgaaacctgcatctcacacaggacctcacaggggaccccacccagcctggggtggcgggacctatcacctctcttcacctcccaagatgccccagttgccatagcaaccacctccttcctgatatctctttggcagctggccaggagtagtgcacattcctttgcctgactcctggccccacccttagcccagccacgcctgagggcccaggttgccggggcagcagggaccagaggaggatcttccgcatggaggaggatcttccacatggaacaccagattctgggacaggggctcacccagtgggctcccgataactttggggaaggacgggtgtgtggaaaacagacaagtgagacaatccaccttttacagcctcctgcagcctaggactgcctcataatcattccttcattcattcatcccagaaaacttgaagagcctttcataaatgtcaggatgaacagcagtgatgagtcaaacaaatttactctctggtggggaaacttacacagagcacaagggaccctgaagcagcgtctcaccatcttggcgcttttgagtactaccgtcacaatttttgctttattcaaatattcctcacactgctatttatttaatttttttccttaaaaggattagcttttttatttttattttttgagacaaggtctcactctgtcgcctaggctggagtgcaatggcacgatcacagctcactgcagcctcaacatcctgggctcaatctatcctcctgcctcagcctcccaagtagctgggactacaaggcacttctgctacacccagctaatttttgtatttttcatagagactgcttttgctatgtttcccagcctggtctcaaacttctgggctcaagcaattcacccactttggcttcccaaagtgcttaggatgacaggcgtgggccaccatgcccaacccaggattagcttttgaaaacaacgagctttattttatagcaccatcacaactggaaaattaatcttctttttttttttgagacagagtctcgctctgtcatccaggctggagtgcagtggcacgatcttggcttactgcaacctctgcctcccgggttcaagcaattcttctgcctcagcctcccaagtagctgggactagcagcggcacaccaccacacccagctaatttttgtattgttagtacagatggggtttcaccatattggccaggctggtctcaaactcctgacctcgtgatccgcccaccttgtattcccaaagtgctgggattacaggcatgaatcactgtgcccagctggaaaattcatcttctttttgccttaagttgaaggcagcataagagcaatctgaagcaggtgatttcgcttttctgggtctggtgtcccccttccaggaaatggggatgaagatcgcacccatatgaaagagttgctatgaagattaagagtaaatgcgctgatatctgtcagatgcttagcagggaggctggaatggagtcagggctacccactgctggttacatcaataaataaaggagaaaaccaaataatgccacaaaattctgcctagattttattgcctgctgaagacttggagcccaaggcctgttttctcttaggtaaaggggggagattaacaagggttggaaggtggtaaagatacctcagcaccaacctaagccatcctctttgaagactagacagagacctgggaagggtaaacttacacattgtgtgaaccgtggtcttgctttggggccacctctatcagtcagtttcggctacagcatgctgtggtaacaaacaggtgttgctttggggccacctctatcaatcagtttcagctagagtatgctgtggtaacaaatagtaccaaaagtctcaggggcttatgacaaccaggttcacgtatacgtccatcacaggttgaccagtcaccaaagaaaactagagcagtcaccactgtgaacattcaggccaccaggctagaagtgaaacagagctttggcctggaggcctgaatgttcctgaatgtttaaatgccccagcctggaagtgacaatgcacttctactcaccgttccttggccagaattagtcacatggccctacccaacctccagggagccatccatctgagcctggaagggggaaggagaacaccaacgacatcaggcatcaccctggcacccctcaccctctccccatgtggcagacagtctgctgccaaattctgctctagggaaggccaaatataataagaactgtcagaggcattcgagaaccatcaggatgaacttgttgaatgggaaggatgttctgagctctcctgcaggggaacatgattagggtccaggaaggtgggaagtggagaaaagtgaatccagagacacacacacattttatccacatgtgaacatttctgaaatcattatgtgtcttctaatggatggggacatttcacgtggtagagttccaaacatatttacacatacacacacacacagggaaaactattacaaactcaattttgaatcttaaacttgatggtgccttagaaataagtaataatgggccaggcatggtggctcacatctgtaatcccagcactatgggaggctgaggcgggcagatcatcggaggtcaggagtttgagaccagcccagccaacatggtgaaatcccgtctgtactaaaaatacaaaaattagccagcagtggtagtgcacacctatagtcccggtccttgggaggctgaggcaggagaattgcttgaacctgggagatggaggttgtagtgagctgagatcgcgccactgcactccagcctgggtgacagggcaaggccctgtctcaaaaaaagaaagaaggaaagaaagaagaaagaaggaaagaaagaaagaaagaaagaaagaaagaaagaaagaaagaaagaaagaaagaaagaaagaaagaaagagagagagaaagaaagaggggagggagggagggagggaggaaagaaaaagaaataagtaatgtggggtatgaatcagcacagcttccctgtactggatggagtatcaggagtgagtggatgtcagcagtagcagcaggtgcctgtcggagctctcaggtgactgagaagttttagggagtattcaggggaagctgagacattcattggttcaccagtggaaatggggtctgttttaacctcatgacatcatgtgcaagtgggagtgtgtctgtgtttttcagggaatgagtccatagcttgcatcagacctccataggggtccagaaccaggactgccatgtagtttgagaagattgtacactgcatagaggatggtgctgactgatggagtgagtaggggctggaatccagcttgagctatgctcttccagccttgcggcctgccatgaggccacatcatccaaaccaaggggtctctatctgacttccacaaagaaatgattaggccagtggctccatctggatcctaaaaaatattaagaaatacactgttaagttttttttttctttctctttttctctgcttctttccctcagctcctgaggaacctgacccattttactatggtgagtgttggatttggggatagggctggactggggagtagctgcaggtgctcacagatcactccggacatggcttcagctgtggccacacgatacgtgctgggccactggccacgggaccatatatgtgggtgtggttcacatcagctgagttcatggagggcagaaccagatgggggagtggggatgcctcacactctctctgagcccccttcaggtctcaccgggatctgggctggtgccttggtgtcgccagagaagcagatgaaggaaaaccttagaagcaatgactctgagcccaggctgcctggatttgaatcctgccttatccactcactagctgtatggccttgggcaagcaactttgcctctctgggcccttctgtaaacaagggatagtaatagttcccacctatgaggactgtgggaaagatacctgactggtggcattaaatctcctccatggcactgaagctcaaataagctaccccaggcctggtagatcgggctccagtttcccctctgaacaccctcctcttgcccccaccccacccctttgctcattcatactttttccctaggtgtcaatttctctcccatctcaggacctttgcgtgtgctatgattctgcagtaatgcttctcctttgtacacgaccggctaaggctcccccttattcaggcctcagatcaaacatagactactctactgggataggccctcctgactccctggcaaggaagagccacaccatactcagctggtgtcgcatgacttgtttttgagggggattgtttctttaatgttttatcacaatacgaaagtcaactccttgctggtagaggcctggaccactactggtacagagtgagtgctccataaattcatatctcaacaaatacttagcgggcacaggctctatttctggcaatgttccaagcagctggagacactgcaatgaaccacacagacaagaattcaagaatgcaagaattcctgccctcctcctggaccttccactcaatgggaaagggacagatactcaagaaaacaaaatatgaaaattatatattagacaagaatattattggccaggtatggtggctcataactgtaatgctagtgctttgggaggctgaggcaggaggatcgctcaagtccaggagtttgaagctgcaatgaactatgatcgtgatttttttttctttttttagacaaagtctgactctgtggctcaggctggagtgcagtagcacaatctcggctcactgcaactcccgcctcccaggttcaagtgcttctcctgcctcagcctcccgagtagctgggactacaggcccacaccactgcacctggctaattttcatatttttagaagagacaggatttcaccatgttggccaggctggtcttggactcctgacctcaagtgatctgcctgccttggcctcccaaagtgctgagattacaggctcattacaggcatgagccactgtgcccagctctacataaaaaatttaaaaattagctgggcatggtggtgtgtgcctgtagtct[134 bp omitted]aatattatgaggcaagaatattaggcaagaataattcctatgaagtaaaataaagaagggaatgagattggaaagtgtggaggagaggatggaaattctgaataggacagccagaggttttgctcacaatcaaataaagcccagacactggtgagggaaggagccacgtggatatttgggggaagagctttcaggctgcaggaacagccagtgcaaaggccttgggataggatcatgctggatatgccccaggaacagtggggaggccactgtggctggagtaggattgatggggagagtgaggtggggtgaggtccaagaaggaaaggaactggatcatatgggactttgagggccctagtgaggaatgtggtttctaccttgagggcaatgggcgggaggagggctctgagcagaggagaaaccagatctgactcaaatgttgatgggtccttgtggctatcagaggtgggagtgcaggcaggccagcaagaccctagagaaggctgctgcagaggccagatgggcgacaatggtggacagaaccagggccagggaggaggtggtagagggagagtattatatatatatccagggtggaaagcgcagggggagagggcaagggaggaaagtagagggtacagagggcaaggggagctaacggtgcccaagcccacaccctacatcctcacatcaaccccctgaaggagtgtccagcacagtccacagcctccctgggcgattctgggttcctggctgggccacccagagccaggactgggctccaggtgcagccaaggtgctgtccctgcctcgatgtcccccattatcttccccagactacaacacggtgcagactgtgggcatgactctggcaaccatcttgttcctgctgggtatcctcatcgtcatcagtaagtgcgacccattcctgggctgcctcagcctccgcttcctctgctggctttcatccatatcctacccgctatgtcctgtcttcttgttctgtctctctctcccaacaggcaagaaggtgaagtgcaggaaggcggactccaggtctgagaggtctggcagcagtgggcaaagagcgggagggggcctcggggtgcctccctagcagatgggcaggatccactgggcctgccatgcgttttccccaaagcctatggttattgaacctctttctacttttctctctcatctctgcctccacagcccaacctgcaaatcctgtaagtctgagcttccctcttcaggtgagggtgagaaactgtgtggttctgggagagttttaggtggggcagggaagggaaccctcagaagggaagtcgcggggatggactggacgcagggggcggagggggggtggtgcctgcagatatcacaggacaattccctaggaagctgaggaaattccgcagatgaaagatgctaaacctggctgggcgcggtggctcatgcctgtaattccaacactttgggaggctgaggcaggcagatcacctgaggtcaggagatcgagatcagcccggccaacatggtgaaacaccgtctctgctaaaaatgcaaaaattagccgggcatggtggtgcgcacctgtaatcccagctactcaggaggctgaggcaagagaatcacctgaacctgggaggtggaggttgcaatgagctgaggttgtgccactccactccagcctgggtgatagagtgagactgtcaaaaaaaaaaaaaaaaaaaaagaggaaggaagaaatgaaggaaggaagggagggagggagggaaaagaaagatgatgctaaaccgtggggaggctgtgggatgtgacatgtcccagagtccacagagattcccagaaacaaatgctcaagcctataaaagccaggacaagctgatttgccaggagaggaagacacaggcctgtgaagagaagggccccatgtgggaggagctctgtcaatcaggagggagagagagggagcactgaggaagacggggagaggctttccagacttgatcgttcagccaggcagatccaggatgaaatagccgaggaagcgggacagagggagggagggaaggtttctgaatagttgcatcaaaataacaaaaagagagatgaatagaatgcagattttagaattcacattggaaaagaacatatgggatgcagggaatgtgaggatggagaagaaagctgggaagaacaggaggggagagagtggagaggacggaggtgttggggagaatgtgggaaggaggagcccaggaaggaaggggaggaggatgggaggaggagggcgtggagggtggaggagggagaatgggtgtaagcatggaaagtgtaaagggagagcgagagggatgcagggcaagcatgtcaacgaaagactgatctctttgaggctgttaattttaattatgtaaaaataacttgacctgtttttagtggaaatgcagcctttctggagacttgtaaaagaacagaaatgggaatttctgtgtctcttataaagttcttataactaaaaaaaaaaaaaaaaaaaaaaaaaatgcgggagggggacacgggttattcaatggttgagaagtatttggtgtggaatttgtttcacgttcctttttttttttttttttttttttttttttgagacagagtcttgctgtgtcctctgttgcccaggctggagtgcagtggcacgatctcagcttattacaacactgcaacctctgcgtcctgggttcaagcgattctcctgcctcagcctcccaaatagctgggactacaggcacacaccaccacacccggctaatttttatatctttagcagagatggtggttcaccattttggccaggctggtctcaaactcctgacctcaaacgatccgccatcctcggcctcccaaagtgcttggattacaggcgtgagccacagcgcttggcctgtttcatgtttatttaatgagttttaaaacatgaacaaggcacttatggatgcgtggggcagcatgggggttggccttgtcacctggggcacagctgaagactttgcacaggtttctggtctatcctaggtgaatgatggtctgcagcgggtggggaatgggggacttcccgttgtatccaaatgttcaggacagggagtgtaggaaaggagtgagggtgtaggaggagattgcaaatgggaagggagatggggactccctttctggcaggcggatagccccaaaagcccaggttgggtctggggtcgccagccccgtagcaggtgtttctctccatgacagcagccaggaggtgtccccaagggaacaagacattagagtgtgggaggcaagacagctcctcagtgttagctctggggtgacagtccctggggtctggcttccatggtgccggggaatggagagccaacgagctgtggggagggaggcagtttccacctttctagtggctcacgcaccccctctctccccagcccctggtggcggcggcgtgtaacaccttcccgaggaaactccgctgccgaccctgcctgagcgcgggagcctgaggaccgggtggaggcggtggggacccagccgcgcgccgggagcgctccccggaatgagccgccccacccaccccaaggctggagccgctgcaccctgctgtccctctccaggccttggcaatgacgatcccccaaagagcccgtctgcaccccagacccagggcctcaggcctccagctcctgggatccgggagtccatcccggcccagcacccccagcatccccgtgtatggcccccctgcacctccttgtctcatccccgaagatccgtccccctggcccctcagtgtccatgtcttgagcttaataaatgtgcatttggttttttcctctgttctgtctgtgtgttctcatctgtggggcacggtgtgggtaggggtgcagaactgaacctggggtagctctcccctgcgtgcccggagtcgccccctcttcattctcctcccccagtgccccgagatgccccccttcaatcccttctccttcctcaacacctccggatttgtcctttcccttcctccagcgaccccagaatagagccctcccgtttctccccctgctctctcagaggcgtccactcaccctagacctgcctgccccatccccgttcccaccctctcccaccactatgccctcacccctgccccccgtcgccctcagcgattccccctcctgctcccaccccgggctctgaagccaggaaacccaagaggaaatgactgagcccgtctgggtccccgcccgctcgcgctcccctggccacaccctccgcctggacgcagcagccaccgccgcgtccctctctccacgaggctgccggcttaggacccccagctccgacgtaagtccctctcgtgcgccacctccatccgctgcccctctgcccacgggccgggctcaggtgggtaggggtttgaccccttccgctcctctccgccccccatccacgcccacatctctctgcctcctctcctgggctacagtgggccgctctgcctcgctcccgcccgcctgcctcagtctccccagctctctgccacccccctcggaccagtgcctcttaggtctctccagcgcgccatccctgcaaggcggcccctgacaccaactcactttttcctctgagcgcgggaggcgttactcactcttcctccttcccctcctcgccgactcccgggctctgggcccctgggggagggaagaggcctcctatctactcctctgccccagtcccctccttgcgtcagtcccagtgagggataagcgcctggcggaaggcgcagggaggtgtttctctgcttcaggagtgcccgccggcccttgcagctgctggaagacccatttatctcatgcttcttgttttctttggggacctgcaggggaaggaagcagggtgacggtttggtatccccacctaagaccctcccctttcccctgaggccagccgtcagcccctggcagggggtcttggaagccagaggtttttgctcagggcagggaaagggctgcaggatccccgggggctgccggaggtcggtctcactgacatcatggctgaccccagcatcgcctggtcccacagatgtcgccctctggtcgcctgtgtcttctcaccatcgttggcctgattctccccaccagaggtaagacccatctctggcctccaccctgccccagagcccccagccaggccagccccacgtgtgctgcggggtgggtggttggcccgtgtgaacgttgtcctgccctgtcaccctcccgctgagccggcaccaggaagtggggatccctatggcggggcgacgttacaccctctttggacacctcagacccgggtggctgcttccagtgagtctggccagggcctgtcctgctgagcatcctccaatttcacctccaagaagaactcactgagtttcatttggcggggagattggtgtcggttttctactcagcagccaggaaacctaggctcccagagtccccaggcattacacagttaggcaaagctgttgagctggggttagtccaaagagttggcaacatctcagccttgcctggaaagtgtctcctgaaagatgggaaccacaggggggtattgatcgttctttctgtgtggcaggtgtggtgtgtgttaggtcagttaggctttgcctctgacagtcagtcacacctgttgtcttgcccattttactgatgaggaaactgaggctcagcgaagggaagtgccctgtgtcagaggagaatgggtggaggagctgagaaaacaactgtcctgcctgcccccagaacccagggtgcatgccccactgaaggcgccctcatttctccttcataaaatgattttcatatactcgttcagtcatttgacaaatatttattgagcacctactatgtgctagatattctgtgcactggggaaacagcactgaataaaacaagaggtcacactctagtggagagagacaagttagtaaattatatcgtgtgctaggaggtgatacgtgcttgcagaaaagtagaggtaatgaggattgtttaaactgggtggtcagggagggcctcactgaggaggtgacatttggaccaacaaacacttggaggaaatgagggaatgagctttgcaggtgtctgggggctgagtgttgtctggtgtgttttaagaatagcaggcaggtggggtggctgggttgggatgagaaggggcagagtgggatgacgagaggacagagaagtgatgggaccagatggaggaggacttacgggccacgtgagggctttgcttttatgtggagtgaagtgcagccagggcagggctctgaaccaggcgggccccgacctgactcaggtggtcccaggctccctctggctgcaggttggaacagactgtgggggcggagacaggagcagggagcccaagaaggaggctgctgggatgtccaggctggagggtacagaggcaggaccaggatgggggcagtggagttatccagcactgaccacatggtaagccgtgtgggagaccctttccctgctctgtgtcatttcaccctatctacagccctgtgaagtagattcagttattatccctgctttgcagatgaagcaactgaggctcagagaaaggacttcacttgttccaggtcacacagcaagaaagttgttgggggcaggatttgaaaccagggcccaggctcaccctagcacctgggctcactagactaaactgactttcccatcccacagggatgggcggggagggggactagaagaagggttcccaggcattggcatagctgaaaacactttcagaattatggattgatgcagccaaagctgagtgattccaccagcagacaggacccctaaggtttcaccagggaggcgagggcgggggtggtgagaggagggggaccaggctccctcctgacttctcatccttgattccccaggacagacgttgaaagataccacgtccagttcttcagcagactcaactatcatggacattcaggtcccgacacgagccccaggtgaggaaagggacacatctatcaagatcctgtcattgcaaataacaacagcaacaaaaatcccaaacttggaccaaacaagggaatttatggatttatgtaacgaaaaagtccaggtacagaccttcaggcatggcttgatctaggtgctcaaatgatgctatcagaacctctctccacctcttggttctgttttctctgtgttggcttcattttcaggaagagtctcctctcatggggccaagatgatcccttgaagcctggggctgtcatcctgtctgctaagaatcccagcaagagaatttcctttccccagtccagcaaatgtcccagaactgagttatctttggccaggctcaggtcgtatccctgagctggccactgtggccacaggcatagaaagctgattggccaggcctgggttccatgtccaacctccaccagggctggtgtcagccccgctgaataaagtggaccaagagtcagggaaggatggtccctaaaggaagttctgggggcttttatcagagcaggtgcatttgggaagctgagttaaacatgtttttttaggcagcacttctcagagtcttgagaaagacaatttgcagccagcatctcgaagaaggagctgtagtgtggcatctgtgggacgtaaggtcccaaagaaggggacatattggttacacatttcggcagttagcaaatggctggattaattaagccatttctattacattaaagttgagttgctacgggaatctctggcatctccacccatagaccttgcccacttctttttctctctccttttctctccgtgactccttgtttctggactccagatgcagtctacacagaactccagcccacctctccaaccccaacctggcctgctgatggtgagtagtgcaggggcaggcggcggggacaggaccaagacaaacaaagtttcccctcttcctctgacactataggtctttggttgcccatttcagtccctactcccagctctgaatgccctggtttactctgggtggggacagccaactccattcaattctttagaaaaagaaaaccaaaacgcttttgaaattgtgaaattaacatgcatatagaaaaatacaaaacccataaatttacagtgtaataacttactctaaattgaatccctatgtaactaccaaccgggtcaaggagcagaactttgcaaacacccccagaaagtctctgtgtgccagtcccatttatttcttcctttcatctcttttttctctgatcccttttttgaattttttgaacaatttttggacgttttcttgaagtataattcaaaaagtgctcccggccaggcacagtggctcatgcctataatcccagcactttgagaggccaaggtggatggatcacttgagctcaggagttctagaccagcctgggcaacacagtgagactccatctctacagaaaaatacaaaaattagccgagtgcgttggcgtgctcctgtagtcccagctactcgaaaggctgaggcaggagaatcacttaagcccagaggcagaggttgcagtgagccaagatcttgccactgcactccagcctgggcaacagagcgaaaccctgtctcaaaaaaaaaaaaaagtgctccctgattttttcaatcgatgtttaaagacacagtagtacaaaaacacattctgcctggaaagaataaaatgattgtaggcaaaactaaacccctttgtcacctcccctccccaatcctcgttctctccctctgtctctgagaggtccccactgtcagcattggggtaggtccccagtgataccacatcccatgtatattacttggagaaaatgcactgactgtgtgctgtgtttgtgtgagcttaaggagaccttatgattgttctgcagcttgctttgtttcttcgtgcagtcgtatgtttggaagttcttctcacatcactgcataaagacttgttttgttttctctcctgcctggtattccacaaggcgcctatatcacagcttatggagtcacacacttcttgatgaacatgttggctgtttccagctttttctgtctacacacagcaccacaatgagcaactttgtcccttcctccttgagcaaacgcacttggaatatgtactgactatgtgctggtcatggttctaaatattttgcgtatgttaactcattcaaccttcacgcaaaccctaagaggcagaaattaccattgtccccattttacagacaaggaaacagaggctgtgagtaactggttcaaggtctcacaacaagtcagggacgcagctggaatcgaagtccaggaatctggcaccagagcctgtgcttttatccaagacaatacagggcaaaggacatgcatgcttaatgttttaaaatttgccctcctgccgcccaggcacagtggctcatgcctgtcatcccagcacttttggaggctgaggcgggtggatcgcttgagcccaggaatttgagaccagcctggacaacacagcaaaacctattctctacaaaaagtacaaaatgattagctgggcatggtggcatgtgcctgtagtcccagctacctgggaggctaaggcgggagaatcacttgagcccaagagttcaaggctacagtgagctatgattgcaccactgcactccagctcaggtgatagagtgagaccctgtctcaaaaataaataaaagtaaaaataaaagttcccctcccaagtgactgtacccatttcctaacccaccagcagtgtgcaggagtgtcccccttcccaaccctacagtgacacttggtatactgacattttcaggttttgccagcctcttaggttttttctgagatggagttttgctcttgttgcccaggtcgctgtgcaatggtgcaatctcggctcaccacaacctctgcctcccaggttcaagcaattctccctcagcctcccgagtagctgagattagaggcatgagcgaccacgcccagctaattttgtatttttagtagagacagggtttctccatgttggtcaggctggtctcgaactcccgacctaaggtaatctgcccgcctcggcctcccaaagtgctgggaatacagacataagccaccgcgcccggccccaattctctttccccagtgactctttcttatccttccctccttgctctcctgacctgaatagaaacaccacaaccccagacccagacccagcaactggaaggaacggatgggcctctagtgacagatccagagacacacaagagcaccaaagcaggtatagcatgggactgagagcagcagcctacgatttttgtttaattctctatctaggtcaacatttccctcagtacgtttctcagtgcccctgtttggggaattgttaatacatttaaaaaaaatgtttttggtttgtggtcaaagttatttggggaaccctgagttaaagttaaccatgtttctttgtggcaggacttctgagagtcttcattaagctaattttcagcaaaggatccccaaggggcagcgtgcagtatgcagtgtttccctaactgatagactttggaactttctttctgtcagttcccctcggagggctggggctatagaatgtgcctgtggatatttcttttttgtacatctccttaatgttagagcaggagcttttcagttgcaaaatatagaaaattcaccttaaacacacacacacacacacacacacacaaaagaatgattggctatataagttctggaaagtccagaagtagccaacttcaggcatagctggatcaaggcgagtaagcactgtcatgagtgctttgttccctctcttggttctgttgtcttcattctctactaacttctcccctcttgatggcagagatggtcccatagttctaactttaggtcacatacgtggtggctagagaacaaaatctttcccattatttctagcctgaggcctagaattgactctcattggttcagctggagtcacatgctcatgtctgaaccaatgagagcctgagaaatgagctgctctcattggtcaggcctgagtcttgtgccccaccctggggctagagaagaggctcagccagccatgcctgaaccacatagaccaagagtcagggaagaggggattttcctttggacaagtgagttagtattaccagaaggtgtgggaaaggagactgagctgagataaggcaacagatcgcctctaatgcctgcgtgatgatccttatttgaggggcagccccacactggaaagtgttgtagagtaggccactcccagagagacatgtacagttgtgcagactgggtactgaacgagagcaccacctctcgggcaatgccattccctttgtcggtctttataattgttccagttttctagtgatagcagcaaagcatctcattcttacagaatctatctattaaaacaatcctacaatggatggaaataaagtgctttacagaagggaacttttctagtttgtacaaaagtgcacctgtaggggtgggggatagcagctgtgtccacacttatcaatgataaagcattctcacatcactgcattaatttactgagtctttgctgacctgagttgctctatgtattggtccatgttcctggatatatgtgacagaaattcatcaaggacaaatggctgtcactgctgagcctctgggttgcctagaggctgggcatgaaagcccccagggcctctcttcctcctctatctttgcttctcttccacctaggaaggaaatggctcatgttatttgagcctcctagctcaaaacttccagacttcacctagggttttaatctgctcaggttacgataacaaaataccacagactggatggcttaaacaataggaattcatttctcccggttctggagatgggaagtccaagatcaaggtgccagaagggttggtgtctgtcgagggctccccttgggtcacagacagccattctcttgctctgtcttcaccatgtcctctccatgtgtgggtgggcttgtgagcttgaaagcaagctctctggtgtcttcttataagggcactaatcccatcatgagggccccaccctcatgatcctatctaaccctaattacctcccaaaggccctcgctccaaaataccatcacatggaatttggtggggtggatagaattcagtctatagtacctagctgtcactcaatatccctacttgggatttcaaaggtctcagggaaggaccagactgaggtcacaagcttccttttgtagcctgggttataactggggaagggagggcaatgtcttcccacaaagaaagggagagctgttccagaaggaggaagagtgctgagcagacagtaatagcaatggctgacttttgctgagagcttgttcatgctgggcactgtgctaagcttctgtgtattcagtcatttgatgcttgtgatcatcctgtgtggtgggaactgtcattactcccattttacaggaaaaggaactgaggcccagagaggttactcagcttgccctaggcaatacagccaagagtggcagaaccggaatttgagtccagactgtctcaccccagggtgcatgagcaccacacaccagtatggctgtccttcgcattcctgtggtctctgccgtggatctggcttataccttcctctgggcaatgcattccctgaatatcttgtaatccttggttgccagttcctatttagggtgtggggcactgagataattccagggaacttgggtttcacgagggagcttctctgtctgctggcttcttgttgaggcctccgatgtggtgtgggggcacttctcagtgcttgggggaggccttttctttggaggtactgatttttttttttttttcaagagaagaatcctttggtattttcggtctgggggcagaggtgatattcagaatagttttgttgttgttgttgtttttgagacagagtgttgctctgttgcccagactggagtgcagtggcgaaatcttggctcactgcaatctccacctcccgagttcaggcaattctcctgcctcagcctcccaagtatctgggattacaggtgtgtgccaccaggcccagttaatttttgtatttttagtagaggcggggtttcaccatgttggccagactggtcttgagctcttggcttcaggtgatctgcccgcctcagtctcccaaagtgctggggtttacagacatgagccactgcacccagccaatattcagaatgttttacaagtttctccagactatgtagctgggtcagagtccttggcaggtgttgccctttcgttcctttatctcctggattatagtgtgggccagaaggtcctaggagaggggtctggagtccctcggggattgaggcagatcagatagtcgcaaccggggctatgtgcttatttcagcatttcaatgcctgtcattacttattgcctctaggtgtggagtaggggggatgcctgaccctgcacaccagctgtgtagatgtgggagaggggtttcttccagatgcagactctcagtaatatcccttgtttctgcctccatggctcactcctgccctccactgatctggccactctctcagctcatcccactgatgacaccacgacgctctctgagagaccatccccaagcacagacgtccagacagacccccagaccctcaagccatctggttagtaactgcctccccagactggaaacaggctattttctgttcactgtgtatttccagcacctggagtacagcccagcacagaatagttctcagtaaagacgtgatgggaaagtaaatgacttcaagccaggcagagggtgggcacatgataaatgtctgaatagataagtgaatgcataaattattgctgcatacaaaccacctaaaaactcagtggcttaaaaggataaccatttatttagctctcatttctgcaatttggaaatctagggtgtgctcagctggctggttcttctggtttcagctggacttactcatgcgtctgaggtcagttgtgggtcagcaaggacctctgtttctaggggcaatttgattctttccctggtgatcttatccaccacttcctgcccagtcagccccccagtgaatgaatggaaatgatacgcccatgggtcacatagagagcccattcatccattcattcaacaaatagtcactgagtacttgtgtgctaggctagttctaggggacagagatagagtggtgaacaagccagaaaaaatctctgccctcatggaactactattctagtggtaagagaaacacaacaagaaataatcataattatgtatcagttgatttcaacttgctatcaagaaaagtaaagtagggttagagagtgactggggagtacaggttgagtattccttatccaaaatgctttggaccaggagactttcagatttcagattttagaatatttgcattatacttaccagttcaactttcctgacccaaaaatctgaagtccaaaatgttccagtgggcatttcctttcggtgtcatgtcagactgttactggaaaggggttccgatccagaccccaagaaagggctgttggatcttgcacaaaaaaagaattcagagagtccatagagtttatttagaaagtaaaggaataaagaatggctactctataggcagagcagccccacaggctgctggttgcctgtttttatggttgtttcttcgttatatgctaaacaaggggtggattattcatgagttttctgggaaaggggtgggcaattcccagaactgaggattcctcccctttttatactgtatagggtaacttcctgatgttgccatggcatttgaaactgtcatggtgctggtaggagtgccttttagcatgctaatgtattataactaatgtataatgagctgtgaggatgaccagaggtcactgtcattgccatcttggttttggtgggttttaactggcttctttactgcaacctgttttatcagcaaggcctttatgacctgtatctcgtgccgacctcctatctcatcctgtgactaacaatgtctaacctctggggaatacagcccagtaggtctcagccttattttaccctattcgagatggagttgctctggttcaaacacccctgacatgacatcaaaaagtgtcagatttggggacattttggattttggatttggggattagggatagtcaacctgtatttcatatacaaaaccagggagggccccactgggaagggagtgaaggagggagccatgcggatgtctagggaaagtgtgttccaggcagaggaaacagccagtgcaaaggccctgaggtgagaaggtgtctgcatgttcaacagcagggaggccagtagggctggagtgcagggagtgagggggataggaaggaaatgagattagaggaataatgggagccagattgtgtgccatggtgaagattttgggttttgttctaagggtacccaggtatccccctttcctgactttgccattcacgtattcacttcacaaacctttgctgaaccctgacttgctctttgtctgcctctccaggttttcatgaggatgaccccttcttctatggtaagttatccacaggaagatgtgggggaaggaaaggtgaggtccgtctgactctaccccttcatttttctctctgcagatgaacacaccctccggaaacgggggctgttggtcgcagctgtgctgttcatcacaggcatcatcatcctcaccagtgagaactggggttgggtgggaaggacaccaagaccaggagggggacttatgacggagggctgggttctcaaaggtccctgggcaattttgttttaaatgaggtatctattagctgcatatacatacaaaccaccacagaattcagtggtttaaaataatgaccatttattgagctctcaataccacagtttggaaacataggctgggctcagctgggtgattcttctggtctcaactggatttactcttgcatctgagttcagttgtgggtcagcaggaaactttgtttctggggtgccttggctctttgccacatcatcttatccttcactaagctagcctgggcttgttcgcatggtggtggcagggatctaagatagagtgaatgcatgcaggctcagaactggccattatcacttctgcctcattccataggtcaaagcaagtcatgaggctgggtttcattcaaggaaatagactccacctcttgatgggaagataggcaaagtcacatggcaaaggacatggatactgacagggaggggtagagactaagggccatttggcggtcagcataccaccccagcagtcacaagcccactgcacccaggcctggcagggaacaagggctgaaaaaggctgtgtcaggaggagataactgaggattaaatgcctcatggaacaaccccacccactcaatccagcaagaatagaggcttgaagcagccagagtaactactcttttaagagcttaatgtttctgtaaaatcttttggtactcaaatgttgacagctgtgttgatcagggtcatggcaggtggcagaaggacctgcaaacgattaactggagaaagtttaatagagtgatatctctggaggtacaggcagggcaatgagatggtgcagtgccctaggactagcaaggatggggacctgttatcccccagcctgagggacaagaggaggcactggctttgcaggaggcctggtgagagatggaactggaggtggggctgctggcaggagctgtggcctcagaaagagggttccagccactgcctcacttgtgaccaaaccaggagggagcaggggtggtggggatcagatacctaaacctccctctcctcccacccccctgtctcctgccaatgcttaaccagagggcaaggggcccagggccccatgcagggagaggaagttgtggggaaaggcagaataacaagcagagaaactaattttttaaaaaggtttttaaaatgttgtgggtgaaataaaacacgagctatcagttaatctgtataaccaatgccaagtttcattacctctcttgtccaacttcctcatcaagaaaatgagcatagccacatctttttttgccttaaggggagaggcagaattctaacaatcataagacatgattcctgatgtgtgcgtgatccccactgaatctgagagtcaagcactgttgcctcggtcatacaacatgtatgtgttgatcctgactttgcaccaggtcctattctcaccccagtggagaagttaaggctcagagagttaaggagtttgcctaaggtcacacagcacagaagagtcagtaaattcatttgctggcgggacacggtggctcactcctgtaatcccagtactttgggaggccaaggtgggaggatggcttgagcccaggggttcaagaccagcatgggcaaaatagcaagaccctatctctacacaaataattttttttacttaaaaaaaaaaaagaatcagtgaaggattggacccaggtttgtgtgagagcagagcctgaacgttagctctggggccatgtatttttccaacagcaaatatttgtgggctcctagtctgtgccaaacctgtgctgggtgatgctgggggcatggtggtgacaagcagccctggtccctgtcctcaggagctcacatctggtcgaagatgataagcaaataaatgcatgaatgagtggatacagagaaagatatttgccaaataaagcagagtgacagggaagagaggggtggggagagaagccctccctggagtggtgaaattggaactgatccctgatgatgagatgaatcaccaggtagagagagcagcaagtgccaagccctggaggcaggaatgagctgcgcccattgctatagcagcagaggaggcaaagtagccaggacagggtaggttgggggagaggagaagacgaggccagagagctgaggggctggaggaggcaagggtggcaggtgttttctaaagtacccttggcttctaagttccccctccctcactctggagcagccacagatgagtctctggaacccatctgtgtcctcgtacctcaaggcctttgcgctgctgttccctctgcctgtaacacccttcctccaggtgtctcccttacgtccttcagacctttgttcaaatgtcacctccttggcaggccacagtggttcacgtatgtaatcccaggactttgggaggctgaggcaggtggatcccttgaggccaggagttcaagaccagcttggccaacatggtgaaaccctgtctttactaaaaatacaaaaattagctgggcttggtggcacatgcctgtcatcccagctactcgggaggctgaggcgggagaatcgcttgaatccaggaggtgggggttgcagtgagctgagattgtgccactgcattccagcctgggtgacacagcaagactctgtctcaaaaaaaaaaaaaaaaagtaacctcctcattgaagccccagtagccatccctgtgaggatgagcccagctcctgggcctccatgcctccttcctggccttatttccctttgtaggacttaacaccctcccacttagcaccttcatacatttgattttgtaatttttctccttgttggtctttccccatagaaagacaactctgccagggcagggatttttttctttgtcctcaactgtgttcttagtgcctgaatgaatgaataagtgagatacaaaataatgggagtttccaaacggctcatctgtgagcctgtgtgggaagggcctctcgcagggccccagcactggctgttctcggtgtgtttctccatcatttgtttatggagttgcctttgagtttcccgaggggcagggttgatcaatctggttccccagccccacaacacacgataagaatcaatatcactctagctcgtgactgaatcatttccttcacccacaggtggcaagtgcaggcagctgtcccggttatgccggaatcgttgcaggtgagtccatcagaaacaggagctgacaacctgctgggcacccgaagaccaagccccctgccagctcaccgtgcccagcctcctgcatcccctcgaagagcctggccagagagggaagacacagatgatgaagctggagccagggctgccggtccgagtctcctacctcccccaaccctgcccgcccctgaaggctacctggcgccttgggggctgtccctcaagttatctcctctgctaagacaaaaagtaaagcactgtggtctttgccccaggatctctgatcatttgggacaggggagtggaaagaggaggcaggggctgcctcagggccctcaaggaataaagcaaaggccggacgtggtggcccacacctataaccccagcactttgggaggctaaggcgggaggatcacttgaggccagtagttcaagactagtctgggcaacatagtgagaccttgactctacaaaaaataaaaatattagctgggcatggtggtgcgtgcctagagtcccagctactcaggaggctgaggcaggagaactgcttgagcccaggaggtcgagactgtagtgagctgtgattgcaccactatattcctgcctgggtgacagagtgagatcctgtttctaaaaaagaaaaatataacaagccaaggcagggaataaagttagggaagccagtctagtgtgtggcagacaggatggcggtgggcggttgcaggtgagtctgtgtgctgggtgactggccagagagagagtcagggctggcttctgcctgcagtcagtttgagaacactggcgtggtccccataagggagcaggtacccagtgtcagctcacccctaacatttttaagggtttggaggtcccagatcacagggatcccctctccttcctacttctagtcccttcccacaccgggaggggccttgcacacatgagtgtggatgccacagcctgcacctccaagctctatccacagcccccaatacacaaatggccaccctccagggcacttcttggcttaggaatgtgtccaccaagaaggccctgcaggccccagcatgggcgcagagcaatttgggagaggaattcaggggtcctagggatctagaacatggtcgagaagagcataggtgctggtgggcacttcctgaaggcccttgggctcgaccagattaggccagagcaggtcccctgaagtgcaggacttagaccagagctctactcaggcttaagggtcgtgccaaaatcaagagacaaggtcccggtcacagggcttacataacagtgtttcacaacttcaggtcatagcccattcatgggttactaaatcagtttagtgggctctgagtagcataagaaaaaagagagaaagaaagaataatttttaaaagacattagtatatcactaataaatgtaagattgtatatatataatatacatagcatgtcatatacatcatatgcaatataattatatataatgtatagaatatgacaattataacatatataattgttattaatgcatcactataaatgttattactgcatcactaatctcaaatataagactgtatatataatatgtagcatgttatatacattatatatgtatgcatatcttcattataatatgtatattatacacatacagggggatactaaaattatttcattatttgcacctaccacataaagcagaacagatgtctaactgatcaggaggggatgtcatctagatatgagtatacatttacatatacaatggattatgtctttttttttctcttttttttttttagatggactcttgctctgtcacccaagctggactgcagtggagtgatctcagctcactgcaacctctgcttcccaggttcaagcgattctcctgcctcagcctcccaagcagctgagatcacaggcgcccgccaccacgcctggctaatttttgtatttttagtagagatggggtttcgccatgtcggccaggcttgtctcgaactcctgacttcaggtgatccgcccgcctcagcctcccaaagtgctgggattacaggtgtgagccaccatgcccagcctgattatatatattaagttgaataatttgaaaatgtcaatattcaaatgtgtttgacctataaaactagcaatgtcatatggctcaacctaacagtatacatgatagtgtgatatgaaatgcatttcatactgcaggttgctttttgaaaacgttgagaagcactgggcagtgggggacataggttgtggcagggaagataaatttccggttagaacaggaaatgctggcagctatttttgcctgctggctgggtggtggccacaccagtgtgtgcaagatgtttctagtacgatagttctcaaacttcaatcatcacatattcccaacttatgacatattttcaccccatctgtactattattctctcttttaaaagatcaactccctttttagtttaaacatatttattttaaaagccacaatcatgtatggaaaatcagtactgcttgatatagatagaagatagctataaagataaatccaaggccaggcgcagtggctcacgcctgtaatctcagcactttgggagggagaccgaggtgggtagattatttggggtcaggagtaagagaccagcctggccaagatggtgaaaccctgtctctactatataaaaatacaaaaattagctgggcgtggtatcgcacgcctgtagtcccagctacccaggaagctgaagcacaaaaattgctcgaactcaggaggcagaggctgccgttagctgagatcgtgtcactgcactccagcctgggtgacagagtgagactctgtcaaataaataaataaatccagtgaaaagaaatgaagatgttatgttgcattctagctgggtctggagtttcttgcagagggctgtgaaccagaggcctgggtctgtggtgttggagggagaccctcaaatatcagggaggtgatcttcacgctgctgcccaaagaaactgcagggtttgggagtttctttggaactctcagctctgactgtgagtctcacttctgacaccagctgcgggtttgagggttcccgagggtttgacaattcactacaaggactcacggaactcaccgaatgctctcagactcacagttagggtttattatagtgaaaggaaacagatgaaagccagccgaggacagagacacatgcggaagcatccaggaatgtcccaagtgcaaagcttccagctgtctcctcccagcgctgtcttctgcgggcacccatgtgggacagtacacgcagagtgttgccaatcagggaaacccactcgagccttggcgtccagagtttttactggggctcagtcacatagacgtaattgaccacacgtgtggccgacattagtttccagcccctccaggggtggagctgatactgtgtggcccacattcctcaatggaaatcacactgttagaaatgatctggtgtggccctaggtccctatgtaaatagagacactcttatcaggcagaacattccaagggcttagagattaccttccaacagcaaggccagaagtcagccctttggggtaaaattaattccttactatagagactttctccctcatctcatttgatggattaagagatattcaaggccgggcgctgtggctcatgcctgtaatcccagcactttgggaggccgaggcaggtggatgacctgaggtcagaagttcgagaccagcatggccaacatggtgaaaccccatctctactaaaaatacaaaaaatagccaagcatggtggtgcatgctgtagtccagctactcaggaggctgaggcaggataatcgcttgaacccaagaggtggagctttcagtgagccgagatcacaccactgcactccagcctgggtgacagagtgagactccatctcaaaaacaaacaaacaaaacataagagatattcaaaggtgatttactttctgaccatgtgactcaacatgattttaccttgtttggggcctaaagccatgttgtgtgctaccacgtcagttcaggagaatacctgacagcttccttgcgcagaatagaggcggtactaactcaaggggggatgagtggggttggccctcggtgttctctcgccactcattctatcttccatggggtcgggatgaaaacgccaatactatgtttcccagatgcgctcaaagatgtggttttgggtgtggattcagctctgcgaattagaggccctcgcagaagacttggaagaccaaaagagaccatctttctgtgccatttgctgtttgctgtgagctcataggatggtgaaagtgttgagtttttttggctgtaccattccagtgtccagtcactagcctcgtaggtactaaaaggcagttatgctcataaaagaatatctaaattggccaggcgtggtggcttatgcttgtattctcagtactttggcaggccaaggcaggcggatcacctgaggtcaggagtttgagaccagccaggccaacatggcaaaactctatctctgctaaaatacaaaaattagccaggcgtggtgtagtcccagctgctcaggaggctgaggcaggagaatcgcttgagcctgggaggcggaggtttcagtgagcagagattgcgccattgtactccagcctgggcaacagagagagactccattttgaaagaaagaaagagagagagagaaagagagaaagaagaaaggaaggaaggaaggaaggaacgaaggaaggaacgaaggaaggaaggaagggaaagggaaatctaaatggccaataagcacatgaaaagatgttcaatatcaacagtcatcagtaaaaataaatgaaaatcacaatgagataccaccacacacccactaggatggctaaaattaaaaagacagacacttccaagtgggaagaggatgtggaacaagtggaatttccattcgtagctggaccagaaagggatacaatcactttagaaaactggcagtttctaggctggccacggtggctcacacctgtaatcccagcactttgggaggctgaagaccatctgaggtcaggagttcgagaccagcctggccaacatggtgaagccccgtctctactaaaaatacaaaaattagctggatgtggtggtgggtgcttgtaatcccagctacccggggggctgaggcaggaaaatcacttgaacccaggagacagaggttgcagtgagccgagatcagaccactgtactccagcctaggcaacagaacgagactcggtctcaaaaaaaaaaaaaagaaaagaaaagaaaattggcagtttcttaaaaaggtaaatgtgcacttaacctatgacccagctattcaactcttaagtatttatccaagagaagtcaaaccacatgtccacacaaagacccacacacaaatgtttacagcaatatctgtaatagtaaaaagactagaaacaaccccaatgtccatcagcacaagtgagtggactacaaactgtggaaggaagaaagactgagctacacaacacatgaatgaatctcaaaagcattgtcttgagtgaaagaaaccacacacgaaagagcacagactgtgtaattccatttatatgaagttctgaaatatgcaaaactgattaacagtgataaaaatcagaagagtagtggcctctactatgtcagcaggaggtggggagagactgcaaaggggcatgaaagaactttctggaaggattgaaatgttctgtgccctgatgacagtggtgcagattacatgtccatatattgatcagaatgatcaaattgtacgtttaagttttgagggctcggtgccgtggctcatgcctgtaatcacaacactttgagaggccaaggcaggtggatcacttgaggttggagttcgagaccagcctggccaacatggtgaaaccccgtctctactaaaaatacaaaaattagccaggcatggtggtgcatgcctgtaatcccagctcctcagaaggctgaagcaggagagtcgcctgaacgtgggaggcggaggttgcagtgagccgagatcgcgccactggactccagcctgggtgatggagcaagaccctgtctcaaaggaaaaaaaaaaaaaagatttgtacactttactatgtgtaagtgatatttggatgtgtgacccctccaaatctcatgttgaaatgtgatccccgatgatggaggggggcctggtgggaggtgattgggtcatgggggttgatccctcatgaatggcttggtgtcctccccatggtcatgcgtgagttcttgccctcttagctcacgtgacagctggttgcttaaagagcctggcacctccccctctctctgtcttactcctgctcttgccatgggacacgcctgctatcccttcacttcctgctatgagtaaaagattcctgaggtctcttcaccaaaagccaagcagatgctggtgctgtgcttgtacagcctgaagaaccatgagccaaagaattctcttttccttataaattactgtctcaagtattcttttatggcaatgcaaaatgaactaacacagtaaattataactcaatacaaaacaagaacattgaaaacaaataggcagttctgtcctgggtggtgatgattttctgatccctggatctcagacagagcagccagatgctgaagctgacgtgtacaatgggggctcctgattagggtggagggagaagctccttgggcaagtcagtctgctcatgttgtggaatcatttgcagtcttcacttagagcgcactccaccagcctttccaaagagcttgtcaacctctaattccttatgccaagccagaccaattttgcttaaaattgacagtcacaaataatctcaaaatctcgtggcttacaacaaaggtttgtttctcgctctcactacatgtccctcacggttcagctaggagctaggatgggacccaagatgatggggaagcctgggctgggcgcagtggctcacacctgtaatcccagcactttgggaggccgaggcaggcagatcgcttgatctcaggagtttgagaccaacctggccaatatggtgaaaccttgtctctacaaaaaatacaaaaattaggccaagtgcagtggcttacacctgtaatcccagcactttgggaggccgaggcaggcggattacctgaggtcaggagtttgagaccagcctggccaacatgtcaaaaccccatctctactaaaaatagaaagattagccaggcatggcggtgcatgcctgtaatcccagctactcaggaggctgaggcaggagaatcacttgaacctgagaggcggaggttgcagtgagccgagatcaagccactgcactccagcctgggtgacagagtgacagagtgacactccgtctcaaaaactaaataaaaataagctgggcatggtggcttgcgcctgtggtcccagctatttgaggggtgaggtggggggatcgcttgagcccaagagatggaggttgcagtgagctgagatcacgccactgcactccagagtgagaccctgtctaaaagaaaagaaaataaaagaaaagaaatgtttctggttatcatagcaggcagaaggcagaacaaggaacaaggtgagacacacactggctcttatagcctctgtcaggaagggacacacctcatttctgctcacattgtcattatcgaaagcaaatcacacgggcacatttgagttcaacagcacagaacattacaatcttcttataggaaggtatattaatccgttttcatgctgctgataaagacatatctgagattgggaaacttacaaaagaaagaactttattggatttacagttccacgtggctggggaggcctcaatcatggcagaaggtgaaaggcacgtctcacatggtggcagacaagagaagagagcttgtgcagggaaactcccctttttaaaaccctcagacctcatgagactcattcaccatcacaagaccagcaagagaaagacctgcccttatgattcaaccaccttccactgggcccctcccacaatatgtgaaaattcaagataagatttgggtgggggcacagccaaaccacatcagaagggaactgggtattgatgggcagtaatattgtttactgcaaaggacatttattatctcacatagcaagagttctagaggcagaaactgtattcagcttcaggagacagccagaaacaacgacttaaacaggttatttattcctctctcacatagcagaactctgaagtacatagtgcaaggctgggaaagaggatccctaatatcataagggaccagacttgctgctctgccaccctaagcatgtggcctgaagcctcaagatcacaaaatagctgcagaagcctcagccatcatgccacattccaggaaaaaaatcaagaaggggaaaaaaaagtgagaaaggaaaggcaccactaggtgattcagctccttttaaagggacttcccaagactccctcccaaagatttctacttccttcggattgctacctctaattgcaaaggacacagaaatgtggtcttttagctgagtccgtgacaccccaaataccatcaaggaaaataattgccctcaggaatttgttgattaggatgctgagaaggatggggagctgccaccaagtcaggagatggagcctcaagtcatttttactccaatgtaaaaggaaaagataactgttaagactgggggttggccaggcacagtggctcacacctgtaatctcaacactttgggaggccaaggcaggtggatcacctgaggtcaggagttcgaaaccagcctggccaacagggtgaaatcccatctctactaaaaatacaaaaattagccaggcatgtgacacatgcctgtaatcccagctactcgggaggctgaggcaagagaatcacttgaacctaggaggcggaggttgcagtgagccaagattgcaccattgcactccagcctgggtgacaagagtgagacgtcatctcaaaaaaaaaaaaaaaactggtcgtttttgaaacttccagaggacagcagcactgattctcagacttgatagagacttccagacatcacttcaacagcgcctccaatgctctccaatgctacccaatccctttctggcaaaagacatctttttctgtggcatcatggtctgaagtgaagcctcctcctcctccacccttacatcaggggagatatcttgccaggagctaatggagtggatgttgtaattcagctagcctcctgagtacaattctgtcaaggttcttgttttgaaattgaggccagatcacattaactggaaggaatctgccttttctcatctgacactagattgtgcttttcttggaggtgttgaggatgacctccaatgattgcttcggtaaagtctgttggcttctcaagaagttattgagtcaaggactccagctgctgatggtgggaggttaaacagggtttgaaacatcgcctgaggtggctttgtaatgtatcaccttggccaggttaaactacacttcccagaatctttttccctagatgcctgtgttttctggttagggtgaaccacaagagacattcttgtcagggatctgctgggtagaggtgaagccacggacatttcgcagcttataccagttgtcacttatcagacagctcatctcattggcataaggcagcaaccagggctgcaactgtttcaccttccgctggatcctccttcagcttccccagttgttgggccagacatgtgtgctcagccccgtgatgaaggaccatgactctagcaagacacccacagcaccaaggtcatagacaacaagaattagcatggggctgggtgcagtggctcatgcctgtaattccagcactctgggaggccgaggcgggtggatcacttgaggtcaggagttcgagaccagcctggtcaacatggtgaaactccatctttactaaaaatacaaaaattacccaggcgtgatgttgcatgcctgcaatcccagctactcgggaggctgaggcaagagaatctcttcaacctgggaagcagaggttgcagtgagcagagatcacaccactgcactccagcctggtcgaccgagtgaaactctgtctcaaaaagaaaaacaaaaagaaagaaagaaagaaaaaaaagaagagaaaagaaaaagaaaaagaattaacataggattcagtccatccttgtggactccagcttgtgcttgtgggttctaacttgttccgtgctctccccaatcttacctcaatcttcccttcctgacttcctgcacctgtgggtttcaagttccagcatcaagacaacagccctacaaagagagcttcactagcaactacaattgttgaaggtcaaattcgtgtagcaaactgtgtgtgtgtacgcccacatatgtattaaaggttcagctttgctgatacagaatttggtactaagagtggttccagaaggccagaatcttaacaatgagatctggtttttctttctcttttttttttttttttgagatggagtctcactctgtcacccaggctggagtgtggtggcgtgatcttggtttactgcaagttccgcctcccgggttcacgccattctcctgcctcagcctccccagcagctgggactacaggcgcctgccacaacgcccagctaattttattgtacttttagtagagacggggtttcaccgtatta[135 bp omitted]gccattaatgaccttgttttcagtaatgaagggtacactgataggtcatagcatggagtggcaaggcagtcactcagaccatcaccagtagcttcctatattaggtttctatagaaggaaaggctctgggtgactgagtatttgcttccacagaacagtttagtgaaaataagaagtgtaatggggttggctcattgctgctgactgtgctggaaaacttggagctgaggtggaatgatggcactcagaactttaccttcccagctctggttctgtataagggacttgaaagcttctgtgagtggtggccctgaaagaaacttgtatttcccatagtcatagggctgagatttctgaaaaccaaagctaaagtctaatccaacaaaagttgaacttctaacctcacagggtcttttttgttaaagttagggctttgattggggaggaatgggatcctgaaaattgggatggagacatatgagcagattccagtgaagctgaggactttaagacccctaaattctgccaaatctctttgcctgcagaggcagccctttcactcttgcctgcagaagtgagtctcctcttccctgaagaaattgtaatggccttccataaggcaaggcatctatgctcctcaggacctattcctatcacttcttacttctaagacctatgactagactcaaggctcaagagaatgtgaaaggtgaggtataaaatgtgacccatgagggggtgcaacacacacccaaataattgtcaatttatatcaacagagaactggggaatatgtgcagaaatggatcttaagggtgtggaatcaaggtggaagacaatatagttggatcaagtcaaatgtatttacattggcccaccaagcagagatgtaatgtttgagcttgaggggctaggaatggttctgacagtttgcttggttggctgattgatatatggacccgtacctgggcctataataggttgaaaatgccagaatttccttgggtgtactaaagagcatgaatcagcatatttttttttctgtaaaaagccatagagtaaatgttttaggttttacaggccagtctcagtttttcactcttcagctctcccattgtagcaataaagccatcaaggacaatttgtaagtaactgagcatggctgtgctccaatataagtttatttataaacactgaaatttgaatttgtatcattttcatgtgtcacaaatattatttttcttttgattttatttcaactaaaaaaatgtaaaaaccaattctattttgtgggccacacgaaaacagcccaggaattagatttgacccatggactgtcatttgacgattcctgctgtagtgaaaggtggccaaaggctcagagagattggaatgctggagtggctttatcatgtaagatttgctcatctatacacattgacagtgccaaggggacacgactttcatcctagctatcagaaataaatttgtgaaggagagtcctagcatccttgaagagctctgtggtggctcttctttgtaggtcagaaactctagtggaggtcattaagatggctgaccagaagtgcccaacactcagctgcgtagagtgtctaagagaaaacactggaattcagcaaagaagtgacaaaaccccagaatattgtgatggcagcatagacagggaagcaaagcacctgagcagtattggtgcagagccaagaggactccccattgcaggtaaaaggtaagtggggggtgccctgcagtccttgcagcaatcctagctataagagggcctcacggtcctcacaggcctgaagcccagtctagggagctgcctagaatccacatggctacactgccccagagaaaggactcacactgaggccccactcccaaagacccaggctgctaccacacagggctattttgagaacagagcccactgctagagggcattctgccttggatgccaatagctcctgcatctccacatccctggggtccttctgttattccaccatgtctacacaaaagggtgcaatgccacaacaccagttagatccagaagtacagctatgaccccagcatttgaactcatacagtgccccacaccccagggaacaggcaatctatcacagcagggtggcagcccccaaaacatggggaaccaatgtgcaaatccctcagggaccaaggacttgcctgcctggtgcccaacagtgatggcaatgctgcctcacaactagcagagccaccatgcccagtgcacacttccctagggttcacccagctccttcctccagcaaagccacaccactgcctccttaaacacctgaatattaggccactgaagtattcacagacactgctgacattaattacagccaaagaaatcacatggagatcatactactgtgtttatctagaaccacagccaaagcatcctacacaaccgacactatagggtacatatacaggaaaaagtctttacttatgaaagttactccatcaaattggaagaggtagctattataccagatgtgtaggaacacaagaaacatgaaaaagcaagaaaacatgacacctctaaaggaacacaataatcctccaataatagaccccaaagaaaagaacatctgtgcaattcccaaaaaagaattcaagtgatcataaggaaatttgatgggata[132 bp omitted]ctggccaacatggcaaaaccatgtctctactaaaaatacaaaaactagccaggcatgatggtgcatgcctatagtcccagctacttgggaggctgaggcagaagaatcgtttgaaccctggaggcggaggttgcagtgagccaaggtcgtgccaccgtactccagcctgggcaacagagtgagacaacatcccccgcccaaaaaaatcaggaaaacagttcatgatcagaatgaaaaaaaatcagtaaagagatggatatcataaaaaaaaacacataaattttggagctgaagacttaataaatgatttttttttttttttttttgaaacagagtcttgctcttgtcacccaggctggagtgcaatggcatgatcttggctcactgcaacctctgcctcccaggttcaagcaattcttctgccccaacctactgagtagctgggattacaggcccctgccaccatgcccagctaatttttgtatttttagtagagacggggtttcgccatgttggccaggctggtctcgaactcctgacctggtgatctgcccacctcagcctcccaaagtgctagaattacaggcgtgagccaccgatcccggccaataaatgaaatttaaaatataattgagagcttcaacaacaaactaggtcaagcagaagaaagaatttctaaacttgaagacaggtctcttttgaaataactcaatcagacaaaaaataaaataaaaaagaatgaaggaagcctacaagacctatgggacattgttaagcaaacagatattccaatttccaaaaggaaaagagatgagaaaagacacagaaatcctatgtaataaagtaatagctgagaacttccaaagtctcgggaaaggtatggacatccagattcaggatgctcaaaagtccccaaatagattcaacccaaaaaggtcctctctgtagcacattctggtcaaactgtcaaaagttgaagaccatgagggaatttgaaaaacagcaagagaaaagcatcaagtcacatataagggaatccccattagactaatagaagacttctcagcagaaaccttatattacaggagcgaatgggatgatatattctaagtgatgaaagaaaaaaacctggcagccaagaatactgtaacagcaaatctatcctttagaaatgaaggagtcataaagtctttcccagacaagcaaaaactgagggaatttattaccactaaagtagccttacaagaaatcctcaaggagtagtaaatcagcaaattatctgaataggcatttctcaaaagaagacatacaaatgaccaacaagtatatatgaaaaatattcaacatcattaatcatctggcaaatgcaaattgatactacaataagatatcatctcactccacttagaatggctgttatcaaagagaaaaaataacaaaagctggcaaggatgcagaggaaaaggaactcttatacactgttggtggaaatgtaaattagtacaatcatactggaaaacagtatggaggctccttaaaaacacctaaaaatagaactatcctatctatgatccagcaatacactctagggtatatattcagaggacaggaaatgagtatgtcaaagagatatctgtacttatatgccaaagataaggtaagcatggttactatagttgatagtgaagtcaaaatagtaataagaataatgtgactcaaagagacctttggcattcactactttatcatggtatgcctcgaaatgaaatagatgggggagcctactaaactcttgcttgatctgtctaggtgggtaagttctgagtctggcagacttgcagcaccattctcaatagccaagatatggaatcaacgtaagtgtttttcaagagatgaatggataaagaaaatgtggtacagatacacaatggaatactattccaccgtaaaaataatgaaatcttgtcatttgtggcaacattaatgagcctgtaagacattatgttaggtgaattaagccaagcatgggaagataaataccacatattctcattcatatgtggaagctaagaaagttgatatcatagaagtagagaatgtaatagtggttactagaggctggataggggttgaaggggataggaagatgttggcaaatggatacacaattacagctagataggaaaaataacttccagcattccttagcactgtaggatgactataattagcaatgatttattgcaccattcctcaggacaatcaaccagtctgctgatggctaattaattacgtcgaactgtctcttttttaattttcttttcttttttgagacagagtctcgctcttgtcacctaggcttgagtgcaatggaacaatctcggctcattgcaacctccacctcccaggttcaagagattctcctgcctcagcctcctgagtagctgggattataggcatccatcaccacacccagctaattttcatatttttagtgaagacagggtttcatcatgttggccaggctggtctcaaactgctgacctcaggtgttccacccatcgcagcctcccaaaatgttgggattacaggtgtgagccactgcgcccagccacattgaactgttcctgtcatggaaagggcaactcttttttcttattttaattttttaatttttgtaatagaattcgcttaccatacaattcacatgccatacagttcacacatttaaagcatacaagccgatctgattatttcacattgcatgcctgtatcaaaacatctcatgttctccataaataaatacacctatgatgtacccacagcaattaaaaatttttaaaaatcatgtacaagtcaatggtttttagtatatccatagatatgtacagccatcatcacgatcaatttaaaaacattttttttttttgagagagagtcttgctctgtcacccaggctggagtgcagtggcatgatcacggctcactgcaaacttggcctcccgggtttacgcctttctcctgcctcagcctcccgagtagctgggactacaggtgcccgccaccacgcccagctaattttttgtatttttagtagagccgggatttcaccatgttagccaggattgtctcgatctcctgacctcgtgatccacctgcctcggcctcccaaagcgctgggattacaggtgtgagccaccgtgcccagaccaattttaaaatatttttatcacccccacaaaagaaacccaatgctccatagctattttcctcctgttcccaaatgtctcagccctaagcaaccactagtctactctctgtctctatatattttcctattttggacatttcatataaatgtattcatataatatgtggtgtcttgtgattggcttctttcactgaatgtaatgtcttcaaggttcatccgcatcatagcatgtatcagtactatgttcctttctatggctgaataatatttcattgtgtggatttaccacatattggggttttttttgtttttttttttacagaccccgcccccccaaatattgtttatgcctccatcagtttgtagatatttggttttgttttcaccttttggctattatgaataatatgaaaataaacttatgtatttgttattatgtggacataagttttcatttctcttaggaataaaattgctgggtcaaatggtgactgcatttttaacagtttgaggaactactggactgttttccatagtggctgcagtgatgaggtgtggtggctcacgcctgtgatcccagcattttgggaggccgaggggggcagatcatctaaggtcaggagtacgagaccagcctggccaacatggcgaaaccccgtctctactaaaaatacaaaaattagcctggcgtgctggcaggcacctctaatcccaactactcgggaacctgaggcaagataatccccttgaacctgggaggcagaggttgcagtgaaccgagatcacactgctgcattccagcctgggcaacagagggagactctgtctcaaaagaaaaaaaaagttttgttgaactaactcatgaagccatctggtttaagacttttctgtgtccattaaaatgatcatgtggttttgtaatttattctgttgatatggtgtattacactaattttcagatgtgaagccactgttacattcctggaataagtcccacttggtcgtggtctataacactttttatatgtctctggatttagtttgctagtattgtgttaaggatatttgcatttatatttataagagatatttgtctgtagttttcttgtgtctttctctggtttttgtactggggtaatactggtcccaaataatccactggaaagcgttgcctcctttttttaatttttgcaagagtttgagaagaattggtattagctcttctttaaatttttagaaaaatctgccagtgaagctatctggttcttggtgtgtgtgtgtgtgtgtgtgtgtgtgtgtgtgtgtatgtgtgtgtgtgtctttggtcattaattcaatctctttacttattagaggactattcaaattgtctgatttctcttgaatcagtttcagtagtatatgtcttctaataatttatttcaactgggcgcagtggctcacgccagtcccaacactttgaaaggccaaggcaggtggatcacttgaggtcaggagttcgagaccagcctggccaacatggtgaaaccccatttctgctaaaaatacaaaaattagccaggcatggtggtgggtacctgtaatcccagctactttggaggctgagcaggataatcgcttgaatccgggaggctgaggttgcagtgagccaaaatcacaccactgcactccatcctgggcgacagagcaagacttcatc[131 bp omitted]agcctggccaacatagtgaaaccctgtctctactaaaaatacaaaaaaattagccaagagtggtggcgggcgcctgtagtcccagctatttgggaggctgaggcaggagaatcgcttgaacccaggaggtggagattgcagatcgccaccatgcctggctaatttttgtatttttagtagagacagggtttcgccatgttggccaggctggtctcgaactcctgacctcaggtgatcctctcacctgaacctcccaaagttctatgattacaggcatgagccactgtgcccagccgcatgattttgattttaattttaaaatcaaaattttatacagatttgttttgttgcctagtgcaggttctatcctacagaatattctccgtgcagtcgagaagattgtgtattctgcttttgttgggagaagtgtgctatagttgtctgttatatctggttgattaatactgttcagatcttccattttcttgttgattttatgcctagttgttctatccattattggaagtgaggtactgaagtctccaactattattgtggatttgttcatttctctattcatttttattagtttttgctttatgtattttggtgctttattattagatgtatatgtgtttatattgttatatattctgatggactgaccgccttatcattatacaatgcttctctttatctgtaataacttttttgttacaaagcttattttttctgacgttagtattgccactccagctttcttgtagtcactgcatgatatattgatatattgtctttcatcattttactttacatttttgaatcttacatgtttttcctatagatagcttttggctgtatcttggtttttaaaaaaaatctagtctgaaatatttgacttttaattgaattgttcatttcatcaacatttaatgttattatttatacaattggatttacatctgccatattagcttgtgtttcctacaaaatttctttattagtgccaggggttttttgttttatttattgattgattttatatttattgagattttctacataaacaatcatttcaactggggatgggaacagttttattttttccttcccaatctatatgcctcttacttccatttcttgacttattacactggctaagactttcaatatgatgttgaatagaaatggtgaacatgcttgtcttgttcccaatcttaagaaagaaagcattcatttttcactgtttggtatgatattagctgtaggctttttgatgctctttatcaggttgatgaagttctcttctattcctagtttgctaggattattttttgcaaaacaaaacaaaacatgtatgagtgttttattttgtcaatactttgtctgcacctattgatataatcatgatttttcttctttagatggttaatatggtaatagtgattgattttaaaaaattggaccattgttgcattcttagtataaatcccatttggtcatagtttattgtatttattcatttattattattattattttgagacagagtttcactcttgttgcccaggctggagtgcaatggcaggatctcggctcaccccaacctctgcctcctgggttcaagtgattctcctgcctcatcctcctaagtagctgggattacaggctgtgcaccaccatgcctggctaattttgtatttttagtagagatgagttttctccatgttggtcagtctggtcttgaactcctgatctcaggtgatccgcccacctcagactcccaaagtgctgggattacaggtgtgagccaccgcgcccggccggtcatagtttactactcattttacatattgccgagttcaatttgctaacattttattgagtatttttgcatctatattcatgaggagtattttagttgtgtttattattattttttgtactgtctatctggtttgtcatcagggtaatgctggcttcataacatgagttggagagtatttctccttttgtattttctggaagaaattatgaagaattagtgctatttcttctttaaattacttatttaaaaccattgaaaccacctgggccaggagattttttaaaatggcattaactatacatgcaatttatttaatagttactagactattcatattatctatttcaacagtggtgaatgtagtagctggtagtttttgagaaattggtccatttcatctaaattttgatatttatgtgtatagagttattactgatattcctttataagctttttaataattatagggtctgtggtgatagctgtcctctttctaccctaatattgataatccctcccttctctctcttctctctttatctctacctctatctctttctctcccttcttctctcctcagtcttgttagaggtttatcaattttactgatcttttcaaagaaacagcttttggttttactgatttcttctattgcttttttgttttcattgatttttgcacttattttttccttgctcttcatttgggtttattttgctcttcattttctaatttcctatggtgaaaacttagattattgacttgagatctttcttcttttctaatataatcaacatttaagactatacatttttatataagcacttctttaacagaattccacaaattttgataggtttcttactttctttcagctacaaatatttcctaattccctttggaatgtcctatttttcaaatgattaaagattgtcctgttatcttcctgttattgatttctagtttaatgctggccaggtatggtggctcatgcctgttatctcagcactttgggatgccagagcaggaggatcacttgaggcaaggagttcaagaccaacctgggcaacatagcaagacctcatctctacaaaaaatttcacgtgagcccagaagtttgaggtttcagtgagctatgattgtgctattgcactccagcctgggtgacagagtgagactatgtctcaaaaaaaaaaaagttctaaacggtcaaagaacatacttcatatgatttcaaattttttcaactttttaacttctgtttcatgactcacaattccatttgtcacggtgagtgttccatgtgcatgtaaaaaggctgcttattctgctattttggggggagatgttccataaatattgattaaagccatttggttgatgggtaagttctatgtctgtgatgtataacttctatatccttaattttctctctactaattatatttattactgagaggggaatgttggtctctaactacagttgtagaattatttattctctttcctgtcttgtcagttttcactttgtgtgttgttttttttttccaggaaagaaaaataaaatggtttttaataccatatatggatatttcattcttgggaatggtgctgtgcaattactgtgcatgaaatcagattattcaagaaagctggtttttaaatactagtgtaattgccccaaaaaaggcccaacaagacctgcagcctgtttcatgcatgcaacatttaatctaacagcttcatcagccctctctctgcttgtcacggctttgcgtattttgaagctctgttaggttaatacatcataattgacccttttatcaatatgaaatgcttctctttactcctggtaatttttttctctgaactttaatttgtctgatataaatataacaactccagctttcttttgattaattttacaggtatatcttttttcactcttttacttttaatctacaaatttccttaaatttaaagagtttcttgttgagagcatatagttaagtgaattttttaatctattctcataatctcttttaattcatatatttagaccatttacatttaatgtaataattgatatgtttgggttgggtataccattttatcatgtgttttctatttgtttcatttattttttattttattttttttctgagatggagtcttgctctgttttccaggctggagtgcagtggcatgatctcagctcactgcaacctccgcctcctgggtttaagcaattctcctgcctcagcctcctgagtagctgggattacagacacccaccaccacaccctgctaatttttgtatttttagtagagatgaggtttcaccatgttagccaggctggtctcgaactcctgacctcatgatctgcctgcctcagccccccaaagtgctaggattacaggtatgaaccactgtgcccagcctattttgtttttgttcctctctttttcctttcctgacattttttttgcttatttgaacatagtttagtcttccattttaagttatcaattatgatttttactataactatttgtataagttttagtggtaactctagggattacaaaatgcacactgaactttttacactgtatttagaaacaatattttatcactcaaaactttagcactagtaggtctcttaattctcccccttatgttatacttgtcatgtattacatacacattcatgaaaattccatggccaatgttatagttttttttttttccaactgtaaaacagattttaaggaactcaagaggagaatagcctattatatttacccaggtagttattacttctgttgttcctcctttattcctgatgttccaagtttccttccggtatcatttcccttctgtctgaagcaattcctttagcaatgttttttacagcatttccgctgggtatgaattttcttagttttacttaatctaagaatgtctttatttcgcctttattcctgaaagttattttcactggagatagaattccagattgacacttattttctttcagcactttaagaatattaggccatttccttctggcttccatggtttctgctgagaaatatgccatcatttgaattattcacatgtattggcttgttgggttttttttcttttctttttttttttttttttcttctttcaagatattttcttcatatttaatttttagcagtttaattatgatttgtctgtgcatggatttctgtgggtttatcctatttggggttcacttagctccttgaatctgcaggtttaagtctgtatatagggaaaacaaactgtttttcctcttctatactcaccctcagcactcaacacttctgatgccagatgtgtggggttccttccccccccaaacaagcaattctcctatggcagttgggagtcctacaattcaattcagttctaacactatttacctagagacagtgtcagatcccaaaagttaagggctcagtcccgtaagactgcatcccacttcagatgtcaatcataagtgatagattcccaggttatccacaacttctgtctgacttggctacaaattacaggttcacaagatcctttacttgggttcagtcatttgctagaatggctcacagaacccactctgtatgctgaaactgagaattaacttgattaagcccactgaacttaaactgccttacttacttttaattccttacttctagttaatcttaataactatatagctaaaagtcatgtaactaagcaatctactatcttccttatagataatatctctgatgtataggtcaccatggtaacagttgcttaaagttatttttcatgaatttggggtcagctcttgtccagttcaagccgcttgagaccacttcacctgggcctgcgtgaatgtccaagaggtgagcttctgacaccagagggccataaagatcttcctacagatcatactaacgccaccattttctaaacatgcttcctatgaagagccatgaggcttgactatgtgtgtgcagattgccaattacctcactttttcttatcccaattccctttctccacacctcagaccactctgcttctttatctcataaatatccctaaatcccatctttggggaggcagatttgagacccattcacccacctcctcacttggctgtctcatgaacaaaccctttattttttgcaaaacctttcgccacagtgattggcttattgagtgcaggcaaaatgaaccttgctcagtatcagtatttacccacttgttacaaagaatccaaatcaggaacagccggatggaagatgcatagggcaagatatgagggaaggggtgcagagcttcatgtcctgtccagctgtacctgcctcctagcatttccacttgttcagcaacccagaagctctcagaaccctatctgttagggttttggtggaaagcttcattacataggcatgattgattgcatcgttggcctttggtgatgaactctaccttcactccccgtcccgctccccagagatggaggtggggtgtggctagaagttctagcccactcatcacgtgtttggttctctgggcaaggagacctcattctgaagctgtcctggatcccccaaccatcagtcatctcattagcatacaaaaatatttcagttgttttaggagcagtgtgtcaggaagtgggggaaggcatagaccaaaatttatttcttggccgggtgcggtggctcatgcctgtaatcccagcagtttgggaggccgaggcggatggatcatttgaggtcaggagttggagaccagcctggccaacatggtgaaaccccgtctctactaaaaatacaaaaattagccaggcatggtggcgcatgcctgtaatcccagctactcgggaggctaagacagtagaatcgctggaacccaggaggcagaggtttcagtggcaccactgcactccagcctgggcgacagagctagactctctcaaaaaaaaaaaaaaaaaaattacttcttattatgtcacaatggcttttgctaaacttgagatgttttctgtcattatttcttcaaaatatttttcagcaccgcactttcctctggcctctgggatacaaatgttagacctttgtggttgtcccacaggttcctaaggcactgttcaatttttttttttaagtcttttttctttctactatacagatttggttatttttattgttgtatctttatgttgactgactctcttctcccatctccattttgttattgagcccattcgatgaatattttattttggttatagtgtttttcagttgcacaatttccatttgtttcttcttcatgtgttttatttccttgctgatatctttaatatttgttttaagagtttttttatataattgcaaagtttacatcattgcaatagcatgaattgattgtcttttcccatgagagttaagaattttggtatcctttgtatgccaagtaattttggactgcatcctgcacattttgaacattatattatgacactctgagtcttgtttaaatcctattgagaatattgatggttttgttttagtggccagttaacctgggtaaattcagactgctaagttcctacttgccttctatgccctgtagttccaatgtcagttcagtttttgaagcatttgcaatgctattctgatctatcttccaaatgtgtcatccagtggtcagtctgggccctgggcagaagtctaatcattagctcagtttccagtctgcggcatgctaattagggccagatgagtccatgagttcataaataactttatggggtgactttctcaagcccttccctctctgttatcttccgatactttctggttccctgggctcccctttctgatcctccagacagaaactgcccaatttcatgattgtgccaggtctaggatcaagaggttggagaacagagagggagaaaaaaaagcaatggagtctgatcctttccactgaatggagagaaaagtcctttcctgaatttttggcttctgccagctgctctgctactgcaatgggattgctcgaaagaaaacagaaaagggggagaaaataaattctccccactctctctgaactttaggagtaccctttcctgctccttcagccaggcctctcctaggtttctccctgtctgcaccacagtgctcatttccaagttttggactgtattgagttcaggtcaggggatacaggaggaaaataatatagtaaactcatcattgatttggtggcactttgaatttttgtgttcctttcccaatgcaactgttgtaactgactttccaaaattgtcaaatagctgggccatgtattctgtctggattttctagttgtgttcagtggaaaagaaagtgtagcacgtgtttactccttcttgcctgggtttactacttctttcccagaactggaacttgaaatggacttttgaagatttggtttcagtgtcatctgtcttagtctattcaggctgctctagcaaaaataccataaactgggtggcttaaacactggaaatttattgctcacagttctggaggctggtaagtccaagattaaggtaccagaagattcggtgtctggtgagggcttactctccggttcataaacagtcccttctcactgtgtcttcacatggtagaaggagcaaagtatctctcttgagtcttcttcacaacagcactaatctcattcatgagggatcttccctcatgacctaatcatcctcccaaaggctccacctcctaatactatcacctcagggattagaatttcaacatatgaggccgggtgcagtgactcacacctgtaatgccagtactttgggaggccgaggcaggcagatcacttgaggtaaggagttcgagaccagcctggccaacgtggtgaaaccctgtctctactaaaatacaaaaattagctgggtgtggtggtgcgcacctgtagtcccagctactcaggaggctgaggtgggaggatcgcttgaactcaggaggtggaggttgcagtgagctgagatcatgccaccacactctgggtgacagagcgaggctctgaaaaaaaaaaattcaacatatgaatttggcagggaggacacagacattcagatcatagcataatctatatggcaacacctgtggggctggagcaatgtcctctaggatgtggtatgtgccctaaatcaatgactaatatatggtgctgtctttccccaggcaggattcatgggttcccaacacaaagggatgaaaataggattggattttctcattatttcccctagtgatccactatcaaaatttttgctacctcccacaactctaggttcttctggtctagaggtcctatttccaaagggagtgatgcttccaccagcagacacaacaatgattccagtgaactggaagttgagactgccccctggctactttgggctcctcatgccactgaatcaacaggccacaggggaggtcactgtactggccaaggcaattaattctgagtatcaaagggaaattgagtataaagagtatgtctggaatacagaatatggtctagggtgtctcttagtactatcatgtcttgtgattgaagtcaatggaaaactactgcaactcaattgagacagggctgctaatggctcaggtccttccgaagtgagggtttaggtcaccctaccaggcaaagatccaaccagatgaggtagttgctgagggcaaagcgaatatggaataggtaatgggaaaggtaactgtaaacataattataaatgccagccatgattatgtgtccagaaataaaaaactgtagtagtgtaaaccaaaactaaaatcctaaaccccccaaacaactgaacacaccccctcttggctgagggggatcacagagaaacctgaaacactgaattcccggccatgacaggaagggaggtcagacgtgcctcatttcagcccctccattttgagaagttaggcacaactgaccagcattaatattaaaatggggccagatatatgtgttttgccccatgataaaggaccctggctccaccaggatacccacaccaccaaggttggaggcaacaagaactgaaatggggctgggcgcagtggctcatgcctgtaatcccagcactttgggagtccaaggtgggaggatcacttgaagccaggaatttgagaccagcctgggaaacacagcaagaccccatttctacaaaaaattttgaaaaattagccaggtgtggttgtgcacacctggcatcccagctgtttgggaggctgaggcaggaggattgcttgagctcgggaggtcaaggctacggtgagctatgatcatgccactgcactccagtgtaggtgacagactgtaatcctgtctcaaaaatataaaaaataaaataaataaaatttacaaaagaactcacatggggtttggtttgtccttgtggactccggcttatgcatgttggttccatcttgttctttgctctccccaacctttcctccatcttcccttcctgacttcctgcacctatggggttcagttccagcatctgactcaaagataacaacctgacagagaccatttagccagctccctaaattgcataagatcaaatccagtaacaagtccttttgtagcagctaatcagtctataggtatatcttagtggtgcttcagccccccacctgtgattcaatcctgactgatccaggcaccaaattctagccacttcacaaccagagcctggaatatgtgtatgaccccttaagaataggagagctggctggaggagagcttctgttattatctgactgaagtctcaattaaaaaaagaaatgcaaggatggaatttcacaggaaagtagaagaaccccagacaggagggctgcaaagagaaggctgttggagggaggctgagaagagaaaaagggagcaggagagagtagcttgcacttcagacacctccttttccaagcctagggggggcaagaaaggtgggtaaagtcacatccttgagccctccaagaagagatctgcatgactataggcgacatatgttgctgcaccctgcttagctaccattttctcctctttgggtcacagcactcctgttttcctttagggcgcacttctacccatgttcagcccctatgatttaagtaagatgcgatcccctctccaagctctagaaatggacatatgtcccaggcctgggaaatgggaatctatgtaaccctggtgactgttcttggttctgggacagattcatggtcacactgaactgagacccaattctaggacgtttgctgatcctctgtctgggttgctcagatggtagaatgtgaacctggagctgctggtggccactgtttcccccagaagggaggagtcagtttgagaatgaggtcaacacagaggcacattgaactggcagaagggacagggagacactcctcatgtcatcctttgagcacctggatacaactatgtctgaagctaaatatagctggactttttagttatgtgtaccattaagttccatctttgtcattgttattgttgtctttctaattaagtcaatttgaaatcggggttctggcactagcaacagagtaaaaactaataaactgacctttcagtaaaagaatttgttaacgcccatctcatatctcaggtgtgtttgatttgggggaagagcagggaggctggaaatactattaccgatggtagctaactttgtcgaggacttactatgcaccagatgctcttcaaacactatacacattgtaccttataatcctcaaaacaaccctatgaggtggctactaaaattgccccccgttttatttatttattttttgagacagagtctcactcttgtcgcccaggctggactgcagtggtgcgatcttggctctttgcaacctctgcctcccgggttcaagtgattctccttcctcagcctcctgagtagctgggattataggcacccgccaccatgcccggctaattttgtatttttagtagagacgggatttcaccatgttggccaggctagtctcaaactcctgacctcaagtgatctgcccgcctcggcctcccaaagtgctgggattacaggtgtgagcctccgtgcccagctgcccccagttttagatgatcagtttagtttagatcagagagcttaggcagccacctcaaggttatacaacaagcaagaagcattgttaggaagggagtgtccaccgcttcctgacaatagtggctgagatgacttcccgggcatgggaatgggagagggagacattgaatcccccaatttggacccgtccaggttatctaagcacaacctcttgcaatgctgaatgggaggggtcctgcctctggctagtcaggaaagaccttctttattttgggctagaagtgccccctcataattgccacctaacagtcctcctgccctctgtggtcacaggtaagtggagctctgtttctctcactgtaagactagcagatgctagaagcagctgtgccctttcaccgccaacccctggtttcttcgattgttacttggaggctttcctggctgccctcaaagtatcttcttggtgtgggctgattagctcccaccttaattacctcctgacatcacctcaaagctcactttaggctgaagaaaaactataaagtaaatgcttcttattttactgccagtgaaatgatgagcttttcagtgctgtggatttttttttttcttatcatgttcacgtctgacctttcagaggctgacttctaaaatgcaggttagcaaaagtcatgtcaggaggagatggagatgtctcctctcctctgcatctgtgaagaggacagtgagtgcaatctgcaccataaatctagtttgcagaatccgataggacgaggtgtaaaagagggcatggcaatgcgggagtagctttgtgagaattgctctttgcataaaaaccagaggcctcgtgctgcctcagatcccgcgtggccgggatgctcacatctgcagcctggtatctccatctctcactctgctgctacatcctctccactccagctatgctgtgcagactcaccatcctctctcagcactggtcttttgtacacactattccttctcattgaaatactgttccccgcattctttgtctagttaaatcccctcatcctttaagtctctgctcaaacttcgtgtccttggagaagccttgttcgaattccttctgttatcttctctcatgaattcctatacttctccttcatagcaggtgtatagaacatagcacacataaggcacgtgtttatatgtgtttttgtggttgagtaaagtgtgcccccgtccttttaggacagcctgtgccagggcagggaccaggtcttggtcactgctgactagcagtgtgctcataaaggtttgacaacccttgtaggggctgggggatgctgacttatagagttgctgattccgtagtataaatcttccaccacgactgatttcaagctaccaatgtgagttcaaccataactcctgaaaaacttaacaaagggctcttgtgagttgggataaactggcttcagcacataatatggtttggctgtgtccccacctaaatctcatcttgaattgtagttcccataatccccatgtgtcagggggaggaacgcagtgggaggtaactgaatcatggaggaggttaccctcatgctgttctcatgatagcgagtgtgttctcatgagatttgatggttttataaggggcttttccccctttggctcagcacttctctctcttgcaccaggtgaagaagaacatgtttgctttcccttccaccatgattgtaagtttcctgaggtctccctagccatgctgaactgtgagtcaattaaacctcttttctttataaattacccagtctccggtacgtctttttttttttttttttttttttgagagagagtctcgctctgttgcccaggctggaatgcagtggcgcaatctcagctcactgcaagctccgcctcccaggttcatgccattctccttcctcagcctcccgagtagctgggactacaggcatccgccaccatgcccgtctaattttttgtatttttagtagagacagggtttcacaatgttagccaggatggtctcggtctcctgatctcatgatcttcccgcctcggcctccccgaggattacaggcgtgagccactgcacccagccttcaggtatgtctttattagcagtgtgagaacagattaatacagcacgccactgctgctgaccctccaacacctggtacagatttgtggaatgaatgaatgaagttaggcccagaaagcagagcctcctctgcctgtgcctatccatggtatactctccatctgtctgctgtagaaattagctttaagcaaaagtacagcattttctatcaagtaaaatacattcagtgtaatgcaaaggaatattctatgagtaaaactttcccattttcccctggtgttaaaacatactttctagtgtgtaattagagctttgcatgctgtgagtagtgactcgttagtggttcatgagatcaatttagaaggtcctaaccagcaatttttttctgaaatggaattaagtagaagaaaaaagaaatttcagagtatcagagtttgtctccagccttaagtaagtgttactttggtaaactcttattgtgagtgtgtattgttgacagaaaagccaaactttgtgaaatatttaaagaggtttattctgagcctataagagtggccatggcctggggtacagtctcaagagatcctgagaacatgtgcctgagggggtcaggttacagtttggttttatacattttagggagacaggagttacaggcaaagacataaatcaatacacggaaggtgtacattggttcagcctaaagaggtgggatatcttgagtcagagggtggggaacagggcttacaggcggattcaaagactttctgattgccatttggttggaagagttaagctttgcctaaagactgaagaagtccttagaaaagaatgcttgagctaacataaggggttgtagaagacaaggcccttgttatgcagatgaagtctcctaagtggcagcgctcagagaacatgtgaccagggtcagcttggaatttgggatctgattgccataaagagtctactctgtcagtcctgtgatctgtattttaatgttaatgttggtcagttgggcctaaactccagaagggaggggctagaatgaggcatgtgcacctcccatttcttcatggctagaattcagttgttcagatgtctctggggtccctttggcccagaagggggtccacttagttagttggggggctcaggattttatttttggttcaaagtatatattctaggttgtgatgtcaaatgactctcttacagttaacaacaaaagtgtgaaagctactgtggttgatagcaatatcctttggtttagtagctttgttttattttccatgttattacttggaaattcttttcccctggaccctcctaagtctctgtctcctatcccccagagacctaaagggtgaagacactgagcttccagatttgagggcaggagagtcctagtgaggcctggcttggaggccagggaacttcctattccagtctgcaatgttacccttcaatctccagctcccctggctgttggtgcccaccccagagttgtggaagccctttcagtctagctgccccacttggtgacagcatgggcagggcaggacagggagcatcatggggttcatgctttctgccgtccagcctccctacatgcagggcgatggcccctagctgacccttgagagctgaggggaggctaggaagagggttaaaggcgaagccagacccaggccattactgaagtcacatggcctgccaggaaacccctgtctatattgtagctggttgaactaattatattataaatacttttccattttctgcctagaaccatgctctagacatctgcatgaggtcattaaacctgcaccacagccatgcacacacacgtgtgtgtgtgtgtgtgtgtgtaaaagacagacatgaggtatagaagagcaatatagaggtctccatattatgggggaacagacagtcccagagcagggaggtcacttgaacagggtcacagaggcaggaggccacgaacctggctggacactgcagggccaagcaggtaaacactgtgcctgactcgcacccagacttcgcaacaaccctagaatattcataagtcagtaataatagtgttacaggaaaggagtcccgatccagaccccaagagagggttcttggattcccacaagagagaattcagggcaggtccataaagtgaaagcaagtttattaggaaaataaaggaataaagaatggctactccatagacagagcagccccgaggactgctggttgcccatttttatggttatttcttgatgatatgctacacaaggggtggattattcatttctcccctttttagaccatagagggtaacttcccgacatcgccatggtatttgtaaactgtcatggcgctggtgggagtgtagcagtgaggacgaccagaggtcactctcgtggccatcttggttttgatgggtattatctggcttctttattgcatcctgttttatcagcaaggtctttatgacctgcatcttgtgttgacctcctatctcaccctgtgactcagaatgccttaaccatctggggatgcagcccagtaagtctcagcctcattttacctggcccctactcaagatggggttgctctggttcaaacgcctctgacagggtgacaactgtgaccacaacagattcacaaacatgacattttcagagagaggaaggtatgcagggtggtgtgatttggaagaggctgtgggcgtagagggatgggtaattcagttggggtggtcagggagggctgcttggtggaggggactcttggctgagacctgagggctgtgaagttcttagagaagggtgttccaggcagagggaacagcaagcacaaaggcctgagacgagagctagcttggtatgcaagaggaacagaaaagaggaagtgagagtaaggcgggggagggaaggggcagggaatggaggctgtggagaggggagggtttccaggcagcccaggaccctcaaggagagaaacgttggatgtagtctcccaggtagggtccatctggcccttcctcctggctcctgcggagtccgagtggctctttccctccttccctcctctcccctcctccttctctccctctccattttccctgcaaggtctgcagcccaactccagctctcccattactacaggggctggtgggtccttctgagcaagaagatggggctctttgtctacagtgtctgtctatagtcattcacccactcattcatttaatcattcactcattcattcattcatttagccactcatttgtcaaatattgatttttctcaggtgttttgccctcacaggtcctgccgcctaaaacactgacttcttatctctcaaggctttgctttcaacactgtctcttccaagacctctccctgaccactcccaacttactaaacccctatcaccctgttagcttttgaatgctcttcatggtaaaacaggacaggttgatgctctccggggctctctctacacacaagagagagattagcctgacgggcattcgtttacccttctcattttctttgggaaccagcctcccctgctcttagtctatgtgattcggacacagccaactacatttcccagatccagaaatgaacacgccattccaagtaaagccaatgagagacagctgcaggacttttgctggaactattgggaaagtggtgtttctttttctgctatggttacttatctgctatgctctaagcctggaactgctggaggtcatctttgctgcatgaaaatgaagtcaatattgaggacagcagaggtgagagggagagaggcataatcctgagtgtattgcaggggcacctggatccagccatacctgaaatccgagactttccattctaagaaccaatacattctctttgtacttaagctagtttgggttttaatcacttgtgccagaaggcctgattgataataaaacctcaaagataagcaggcagtcaagcttaggtactttccttttaagagatgcgggcaggtgcttccttctctcagaaaccactcctcctctaggaccttctattctaagaagcctgggtgtttgaggttcgttcatcctgaggcataaaaacaagatcaaagtgccaggccagacggaggcagagtgtctacagaagcagccgtgcaactagcagcaggaattgggaatctgcattattaataagcaagcccattttcctttacttctttgtaagcagagccttaattttattagcctgtttattagctctgaccatgtgttcagaaaaagtaccctcagcctctgagtgatctaagccaggcatagttctcctgtcttcttgttggtgattggttctggaaaaggctgggacacactcctggccaaggagaagtcacagcagtgactgacttggagggggagtctgctgggggctggctagtggaaggcatctggggtaaaatgtttttgctcttaaaaagtactgtaggaggccaggcatgttgactcaggcctgtaatcccagcactttgggaggccaagatgggcagatcacttgaggtcaggagttcgagaccagcctggacaacatgatgaaaccccatttctatttttaaaaatacaaaaattagctgggcatggtggtgtgcacctgtagtcccagctactcaggaagctgaggcaggagaatcacttgaacctgggaggcggaggttgcagtgagtggacattgcaccactacactccagcctgggtgacagagtgagacttcatctcaaaagaaaaagaaaagtactgtaggaggccaggtgtggtggctcacacctgtaatcccagcattttgggaggccaaggcaggaggatcgcttgagcccaggagttcgagaccagcctgagcaacatagcaagaccccatctccaaaaaaattttaaaaagatacacaaaatttgccaggcgtggcggtgtgtgcctgtattcctggctactaaggaagctgaggagggagaatcacctgaacctgggagatcaaggctgcagtgagtcataatcacaccactgcactccagcctgtgtgacacagcgagatcctatctcaaaaaaagaaaaaaataataatgtaagagaaataaactttttcttttcctcgcagagagaatgtggcagtgtgaggaggcatttgctggcttaagctgggctctcaaactcttagtctagagcagagttctaacagcatcacgtgtttttgctttctctttcatccacgttgaagaagagggggtagtaaaaatattcctctggtttaacaaaaaattcacaaatatttatccttttcagaatctacatgcaatttaagtattagtcccagaatcacagatgctggaatgttaaagtttctttgacaagacatactgatgatctctgaagtccctgcggcctgcaaagaatatttgcaaacagagttttatgatgctgaggatgattctgaagccacagagaaagacatcatttttcttcttttctttctgcaatttctttcattagcacttcggagcacctatagtcgccatgagttgaaatctcatgagttagtagtaagagcagaatcagagaggctaaacactgaaaatacagaaaggaaatgggtagagtaggattttagcaagaggaagtatacggttgtgatgctttgcacctataggaaatgatggctggggctgtggcagccacgttaccaccgtgagggatgacattgcccacatgctgaggagcctgagtctataagaacatcattcaactgatgcattgacccctggagaacctccccgcctttgggggaccagcagttctgtaaaataatacgtgtccttattgctttttttttttgagatggagtctggctctgtcccccaggcgggagtgcagtggcgcgatctcggctcactgcaagatccacctcctgagttcacgccattctcctgcctcagcctcccgagtagctgggactacaggcgaccgccaccatgcctagttatttttttggatttttagtagagacggggtttcaccgtgttagccaggatgatctcaatctcctgagttcacgccattctcctgcctcagcctcccgagtagctgggactacaggcgaccgccaccatgcctagttatttttttggatttttagtagagacggggtttcaccgtgttagccaggatgatctcaatctcctgacctcgcgatctgcctgcctcggcctcccaaagtgctgggattacaggcacgagccactgtgcctggcatccttattgttttaagatgtttggaatttattcttctcttacttgcagccaacagcatcctacatgaggcagccagggtaagtggtccacatacaatgggtgaacaagtgcttatccaggaattgaaagagcctggctcattcagtgctaggaccagagccctcagtggacattgtcccacctttcagcactgaggatgcctcctcccctccaagccagtcattgctgtatgtgatcatgttaattaggtatccatattccacaggagggagcaacgaggttttcttttttttttttaagatggagtcttgctctgttgcccaggctggagtaaagtggtgccatctcagctcactacaacctcctggttccagcaattctcctgcctcagcctcccaggtagttaagattacaggtgcccactaccacattgggctaagttttgtatttttagtagagatggggtttcactatgttggccaggctggtctcaaactcctgacctcaagctatccgcccaccttggcctcccaaagtgctgggattacaggcatgagccaccacgcctggccgcaatgaggtatttttttgtttttttgtttttgtttttgttttttttcaattctagccgccaatcacaaaatttaactaaggtccctcccagcacacacctgtcatccatcctgaaaatttaaagtaaaggtataaaaatatcaaaaccatgattgcctttggggatggagtggaggtggggattatctgggaaggggcataaggggattttgcaggggtcacggagatgttctttatcttaacaggggcttgtagtctaaagcagaagcgtatacttattacataagtgcattcattggtcaaaactcagcaaatggagatgggaacagtggctcatgcctgtaatctcagctactgaggaggctgatgcatggggatcacttgaggccaggaggtcaagaccagtctgtgcaacacagaaagaccttatctcttttaaaaaaaaaattgttttaattccccaggcatagaactcaccctgtggagaaaaaaaaaaaaaattagccaggcgtggtggcatatttctgtagtaccagttactttcaaggctgaggcagaaggatcgcttgagcccaggaggtcaaggctgcagtaaactatgatcacaccactgcactccagtctggggtacagagtgggagcgcatctctaaataataatgacaatactaagaaattcagcaaatggatgtttcatatgtgtgcatttcattgcatgcaaatttataaaatctcaaagataactgcaaacattgaactccagttggtgatatgaatcctgaaatgtttaagggtaaagagtactgatgtctgctttaaaattctttaaccttctttaaaaatacatttttaaaaaatcagatgacttgatagaggaatggactgatagatatgtaataaagt[136 bp omitted]tggccaacatggtgaaacaccatctctaccaaaaatacaaaaattagccaggcgtgacagcgcatgcttgtaatcccagctactcaggagaatcacttgaacccgggaggcagaggttgcagtgatctgagatcatatcactgcactccagcccgggtgacagagtgagactccgtgtcaaaaaataaaataaaataaaataaaataaaataaaagtgatgatgatcatagttatgaacaacagtgagagttcacacactgcctgtactgtgggcaaagcccgttctcagtgcttcgtgtgaatgaatttgttcactcctcactacaaccttctgagatagatactgttattctcattcacagatgtggaccctgagaccagggaggttgcgtggcatcattacatcagaaggggagtggtctgaatccactcctccccttccagggcaggaagtcaacagagaagggctctgtggtaacgttgacaatcacaaatcagtggcataaacatctccttaagacatgcagaggcagctgggcgtggtggcccacgcctgtaatcccaccatgtgggaggccaacgtgggaggatcacttgaggttaggagtttgagaccagcctgggccacatagtgagaccct[131 bp omitted]gtgaaatcctgtctttattaaaaatacaaaaattaaccaggcatggtggcaggtacctgtaatcccagttactcaggaagctgagacaggagaatcgcttgaaccatgggagacagagattgcagtgagccgagatcgcgccagtgcactccagcctggacgacaagagcgaaactctgtctcaatgaaaaaataaataaataaataaaattaaaaattagcagggcatggtggtgcatgcctgtagtcctagctactcaggaggctgaggtgggaggattgtttgagcccaggagttcaaggcttcagtgagctatgattgcacaactgcactccagcctgggcaacagaacaagaccctgtctctgaaaaaaaaaaaaaaatgtggaaattgtgagagacacatgacaacagaaatgtgactactgcttgcctctggaggaaggaagaggtggtggaggagagataggtggctggacactgtggcaacaccagcataccaggggctgggagtggggggcagtcaggacatgaggccagaagctgtgaatcttggaatctgcagagtgccccttatgagaccccaagcattcatgtaagcgtccatgcccccactgatgatatctgggcagagaggcaataaaatcagagttgttgatcaagatttggaggctgcggttggaggccggacatcctgcctgcagggcaggcttcagcttggaagcttgcggcccagaacagtccccgtgggcacacccaggcagagggttttgctaggtgtctgacccagcttccaaagccagggtctaataacaacagcgccaccaacaacaggaaacatttgtgacgcacatgctgccaaagcactgttctaagcactccttacagtttaatcctcccaacaataagaatgaggtaggtaccagtgctaaccccattttacatagggggaaacttaggcacagagaggagaccccatgaaaggcaatggggacacctccaggaacctcccaccaaaaaagatcactgcagagtaaggacaaatcgaacatcagatttcctcaagggtgggcactttctcgatgcatttctggtgccctcttttggatttcagcctcagtggccacaacaccacgggtgtcagtgacaggagcaaaccaaatgcactggggactcagctgggaggagccgccctggcattcccaccatgtccgtgaaatggggggaatcgtggtatgtacttgagaatcaacagaggctgggcgaggaagacttgggatacttgtgagcccattctaacatcagcaattgctaatatcatgtttattgccttgaataaaagagatgaagaaataaaggaaaaagaggaaaggaagggggaaaggaatgaagaaaggagagacaagaaataaagcattttaggccgggcctgggggctcacacctgtaatctcagtacttgggaagactgaggtgggcatatcacttgaggtcaggagttcaagaccagcctggccaacatggcaaaaccccatctctactaaaaatacaaaaactaggccgggcacggtgtctcacgcctataatcccagcactttgggaggccgaggcaggcggatcacgaggtcaggagatcgagaccatcctggctaacacaatgaaactccacctctactgaaaaaaaaatacgaaaaaagttagccgggcgtggtggcatgcacctgtagtcccagctcctcgggaggctgaggcaggagaatagcgtgaacccgggaagaggagcttgcagtgagccaagatcacaccactgcactccagcctgggcaacagagcaagactctgtctcaaaaaaaaaaatgcaaaaactagctgggcatcgtaatgcacacctgtaatcccagctactggggaggctgagacaggagaatcacttgaacccaggaggtggaggttgcagtgagccaaggtcgcaccactgcactccagcctgggcaacacagcaagactccatctcaaaagaaaaaaaaaagaaaagtattttaatatcaaagaagaaggaagagggccagaaagaagagatagggctgaaaaaagaaggcaggaaacaagcagaatgtttccaaagagtcccatgaactattcagaaaacagttgttttgttttgttttgttttgagacggagtcttgctctgtcacccaggcaggagtgcagtggcatgatctcggctcactgcaaccccacctcctgggttcaagtgattcttctgcctcagcctcctgagtagctgggattataggtacacgccaccatgcccagctaatttttgtatttttagtagagacggggtttcaacatattggccaggctggtctcaaactcctgacctcatgatccactcactttggcctcccaaagtgctgggattaccgcgcccggccaagaattttgtctttaaaggagttgacagtggggtgtggaccgtgtagccgagacagcttgcagggtgagttaagagtccgcctggattccatccccagccctgccacactttgtccatgaagcaagtgactgtcccttcccaagcctcagtttctgcactgcagaatggggaccattgtccgtggcatttccacaggttggcgtgagaacctgttgagcccacgcagcaaggtgtgcctgttgtctatggtaaggggcagacggcattgcctactttccactcgtaagatgtcattgcatgtacccggttctcacttggcagatgaatcaaagggctataaatagccatgtcttggtttctcataaacgcattaaatatgacttggcatcttgcccaggcttcctgtcagggcagtggacgaggattgttttgcagaggtctgatgagtgtcaaggttatagtcacgtgcaggtgcgtgaggcaggactcgaagtgagccccagctgccctggggaatgagggggtcttcccttccacccccatgccctccttggcataggtttacaccagccactgtgggccctggcaagccccgccttgtggctcaggctgggccactggcctctttgctggctttgcctggactcaccccactggtccagcttgcatttggtcagtctattcacaggtgaattctgggaagactggacccggctatgggaagaggggagaggagggaaaggtggacacatgactcgtgagcttgctgggctgtcctgggcccctccctccatcttacttcatgaagttctctgaggctgacctcacccctgactcagggatgaggccctgggggtggcagatgtggactctggaaccccgctgcctaggttcaagtcccagctgctccatagaggacctcaggcttgtctatgctctcagtacctcaatttcccccctctgtgaaatgaaggtaatgcctcatagaatctacctcatggggctgctggaaggattcaatggatgttgatcatgatcatgatttcctgatactcagaataatgccaggcacagattatctgctctgaaaaacgttttgctattattatttttctgctagtgatagttaagagcaaggactctagacccagcccagttgggttcaacgctcagctccaccacttgcaaccaatgtaaccttaaacctggatataatctctctgtgtcagaggcatgtgaaccagaacaactccatcttgaatggggctgggtaaaatgaggctgcattcccagatggttaggcattctaactcacaggatgagattggaggtcagcacaagatacaggtcataatgaccttgctgataaaacagtttgcagtaaagaagctggccaaaacccaccaaaaccagagtgacctctgttcgtcctcaatatgacactcccatcagcaccatgacagtttacaaataccatggcaacatcaggaagttaccctatatggtctaaaaaggggagacatgaataacccaccccttgtttagcgtaacatcaagaaataaccataaaaatgggcagccagatgccctcagggctgctctgtctattgagtagccattctttattcgtttacttttttaataaacttgccttcattttactctacggaattgccctgaattctttcttgtgcgagatccaagaaccctctcttggggtctggatccggacccctttcctgtaatgtctgtgcctcagttccttcatctgtaaaatgggagtgatgattatctgtaccttatagggtgtaatagggataaaataagcaaacacccgccaagtactcagacgagagcctggcacacagtaaatactccaatgttgttgctaccattgatgttcttgttacaggtggttgtgctcaccccgcatcaaggttgctaagctgctgtgatggaatcctggagctgctgaaggacacctcatctctttgtgggaagcatctgcttgaggattaagggaatgcagaaaaaaagtggagtagagagatggaggaagatgactttcgaggacattgtgtgagcacctggatctaactgtgcctgaagcaaaactcaaaccctggactctcaatgtattggctctcagttccaagacccaataaattccttcttagcttagaatgctttgctcagatgtctgttacttccagccaaatgtgttttaatacagaaagctcttgggggctcaaataacagaaagggaagctatatgagaagctgagggaagctaaggagaggaacagaagtgatacagcagggtgtggtggctcacgcctgtaatcccaggtctttgagaggctgaggtggtggaccacttgaggtcaggagttcgagaccagcctggctaacatggtgaaaccccatctctactaaaaaaaaaaaaaaattagtcagacgtggtggcatgcatgtgtaatcccggctactcaggaggcttagtcaggagaatcacttgaacctggaaggtggaaattgcagtgagccaagatcatgccactgtacttcagtctgggcgacagagcaagactccatttcagaaaaaaaaaaaaaaaaaaagaagtgatacagcttaagagagtaggccatgtggaggccacatgcatcatgggttagaatccaggctgttactgagagcttgtggtaggatgttgcagaatggacacactctttcatgcctccttgtgtacattcttacaaggtgactttgccactcttcccatcaagggatggagtctgtgtctccaccccttgaatctgggctgaccttgtaatttcttttggccaatcaaacatggtgaaagtaatgctgtgttagtttcaagcctagacttcaagaaaccttgccgcttccatgtactctcttagttgatcttgccatgaccttgtgaacatgaccgggctagcctgctggaggatgagaggctggaggctccccagcgaactgcccatccagccccctgaggcagagccacctagctacacagtgctggccacagatacatgagtgagcccaacctacattaccaacctgcagaatggacagataaatccatcaatgttgttttaagccattttagatgatttcttaggcaacagtagagaactgctttgtctggtttaactcaaccttgcccaagggccttccaaaaccctgacctccaggtcacatgacaaggtgaggcctctacatcccagtccctggtgatactgtgctagtttggaggctgggtctcaagtgaccttgcaacttccattcactttcttggactcctgccaccaccttgtggacacacctgggttggcctgctggaggatgagagagcaggtggaggagaacccagcggctccagctgatgacatctggtccagcctacagagagccaactatcgagtcagccaagatcagcagagccaaccccaattcactgctgctgatcagagaagcaagaatgatcacagctgaaaccagaactgcccaactaatttgtagacttgtaagcaataatgaatgcttacaattattattaaacaataatttaaatctctgacttgggggatgttttgtttgcagccataactgatacactaaccgatacactttgtaaacatgggcaaataaactcacatctctgtgccagagttcctcttgtgaaaaacaggaaccatttgggatggtcatgaggatgtcatgagctcatgatcctaaaactcttggcacagagcctggctgtcttactctgttcaggctgctataataaattatagcctaggtggctatagcctagccatagcctaggtggcttcaacaacaaacatttatttctcacagttctggaggctgggaagtccaagatcaaggtgccagaagtgatgtatgatgagggctgttccctggtttgcagatggccatcttcttgctgtgtcctcacatatcagagagcagagagagaaaaggcaagctctttggtgtctcttataagaacactaatcctatcatgagggctccaccctcatgacctaatgacctcacaagagctcccctgcaacactatgccattgggggttaagatgtcaacatgcaaatttctgaggagacatgcagtccataacattggcagagagtgaacactcaatttaaaaagaggtaaaatgaaaggcagagagacagttgaataacaccctgcccaccatgaacctttttgccttgtccagacagctgtgggtcatttttctttctttctttctttcttttcttttttttttttttgagacagagtctcgctctgtcacccaggctggagtgcagtggtgcaatctcagctcactgcaagctccacctcccgggttcacgccattctcctgccttagcctcccgagtagctgggactacaggtgcccaccaccatgcccggctaattttttgtatttttagtagagacggggtttcaccatgttagccaggatgttctcaatctcctgacctcgtgatccgcccacctcggcctcccaatgtgctgggattacaggcatgagccaccacacctggccagctgtgggtcattttagtgtagcctcccaatggcccataggtccccagcctcttagcccttcatatcaccaacacagagacattccttggtggcagaacaaaaacccttgggaataagaaccacgacctggtaatctgagacctaccgattcagaacaggtagcagcacattgttgtaaaaagctctggattcagttagacctgggttatgatccaatctctgccgtttacctgacatgtgatattgagcaatcaatgcaaccattccaatcttccattttatccctgtaaaataaggataattgtacctacctcccaggagtcttgctcaatcatttcttccttcagtttagtatttttttattttttatttttttaaacagagtctcactctgtcacccaggctggagtgcaatggcctccagctcactgcaacctccgcctcccaggttcaagcaattctgatgccccagccttccgagtagctgggattacaggcctgtgccaccacgcctggctaatttttgtatttttagtagagacagggtttcaccatgttggccaggtggtccggaactcccaacctcaggtgatctacccaccttggcctcccaaagtgctgggattacaggcatgagccaccacgcccagcccttcagtttacatttattgaggtcttacgttgttccagctctttcagaatctggggatacaatggagaacaacaaccacaaattcctgacctcatggagctctcaatttgtagcttaaagaaaaatactaatctgatagtgacagaaacagtgaaaaattgcaaaagagacaagtgttttggaaggagaatgtatcagtcagaataggctgggttatgctgtggtaacaaacatcccccaagtcttagcaccttataataacaaaagtttactttttatctgtcacatctattgtaggtcagtttcacttctcctccttttcaatccaggctggcagaatggtctccaactcaagaattgtgggctctgtgcagagggaaagagaatcctagagtatctttgcccaggcaattaagtgctctggcctagaagtgactgtattacttctgcccacacttcattggccagaactagttgcaaggccccacccaaccataaggaggaccagaaatggcattccgtcctatgcttggaagggagagagccagggggattcagggagcagcactaatgaccattctgaaagcatatgtgtgatgggaagacttccatgaggcaatgatgcttgaagtataagagcagttaactaagagaaggggaaagtaagagttttctaggttggagggcacagcatatagtgaggagagtaatgagtagaaacagcttatgcaaccagtttgattggagctggaaggagcatgtgtggtgcaaggaaaagggaaaagcgagcagtcatccatcgtgcagtaaagaggttttctttttgagacagagtctcactctgttgaccagtctggagtgcaatggtgtgatctcggctcactgcaacctccacctcctgggttcaagcaattctcctgcttcagcctcccaagtagctggggttacaggcacccaccaccatgcctgactaatttttcgtatttttaggagagacggggtttcgccattttggccaggctggtctccaactcctgacctcaggtgatccacccgcctcagtctcccaaagtgctgagattacaggtgtgagccaccgcaccctgcctgtaaagaagtattaatagatgccaatgaacttcctatgtctgaacaaggaaatgataagtatatacaagttttaggaattcagagaagtccatattattctcaggtcaacaaattatttgtacaaggaatcagaattacagattctttttttttagtggttagaattgctttcacaggacatggccacaatttctgaatccccacctgggcgttaattggccagatggccaacaatttacctcctcttcctgggcacacaggcagccatatttcccagcttgctttgcagttgaggaggggtcatgtgactgcgttctggccaatgaaatgttctggccagtggacaaaacagatgacacttctaggcccagctctacccttcatactcagttccatgttctctctgtccattgtgtggtgaccttggaagccagtacttcagatggcagcctgcattcctgagttatctgaatcaagtgaaagaaagccacctgagctgagactatgaggttgaaaccatgccccaaagagttaaaagaaatcagtaactaacagaaattcttgagtttgcaggatggcagataagaacaacttgcggaaatgtgaaccactccctccacttatgagataaaagaactggctgaaatcaactggaaacaatatggctaagtggagtctgtgcagaaccagtttgctgaagtcacagcccaaagtttcatactaacccgtcaagtttgcacatgggaccccctaaggaggcatgagagagaactatgcatgcctgaggactttccagacctccccttggcttccaccaatcactagctaatcccagaatccaccccctaacctttcctggtaaaattactgccttaaagccagcatagggagacagatttcagtgggactcctgtctccttggaagttaacctgcaatataaagcttttattttctcaaaaacctcatgccatagtattggcttgttgtgcatctggcagcaaaccccttttgcttgatactaatgtaagcaggaaacaaacctctgtgttttattctggagcgtatttattgctgcagtggagcctatcctatactgactaatacagagtaacaaatgagactccttcaatagcagtaggatttgccaagacaatttttttttttgaaatggagacttgctctgttgcccaggctggaatgcagtggtgcaatctcggctcactgcaacctccacctcctgggttcaagtgattctcctgcctcagcctccccagtagcagggattacaggcacatgccaccacacctggccaactcttgtatttttagtagaggcagggtttcaccatgctggccaggctggtctcgaactcctgaccttgtgatctgcctgcctcagcctctcaaagtgctggaattacagatgtgagccactgtgcctggcctgccaagacaattttatgatgcagaaagtatctgtattcggggttgtcatgtggagttgtacaagttgagcactgcccgacatgtccagccaagggatgaggggaacccactccatgctccactcaccaggcctttatacaatttgttctaaggtgacaatttgttctaaggtgatatagacaatttgttctaaggtgacagctttagaaagaaagggaatattttctccttttctttctctggcagagtagaagagccgtatagcaaggctaagtactggaattgcatttataagcaattatttttttccccaaaaacataggcctaagaagttaaaaaattacaataagaaaaggaagagggaagaataggatggttaaaaatggaatctggggcgtgttttgtcttacgctgtactctgttgtgcaggggagggtggcaaggctgggcctgaccatgtctcctgcttggtgaggaaagtttcttattgtacagctggccacacgcaaagcggctgctactccctgctgcaacctggggggcaacccacccttacctgtaaggaaccccaccttgtcagaatcacttttttttttttttttgagatgaagtctatctttgttggccaggctggagtacagtggcgcaatctcggctcactgcaacctctgcctcctgggttcaaacaattctcatgtctcagcctcccaagtgctggaattacagctccgccaccacgcctggctaatttttgtatttttcgtatagatgggttttcacagtgttggcaaggctggtctcgaactcctgacctcaggagaatcgccattttaagtggacatcaggtcatgtctctccactgctcaaaaccctcacgtggctcccatttcatttcaaataaagcccacagctgctatcctggcctacagagtcccacacactctcggccctggtgacctccttgatgttctctccacagttgccttcctgtcctaatcagctccgtccaccaagtagacacccagccccagagcccttatatacgctgcctgtgcctgcaactgcttggggtaggctgaataacacctcccaaagatgtcactctaatccccagcacctgtgaatgttacccctggggacctgcaagaggatgtgtagagtgtgccttacaggggtgaggaagctgggtgctcccgttcccatccctcgaggttaaggactgctcctggggtgtcaactgcccagcttctagcctgctccatgagtggcccagcaggcttctggtatgagttaggaaacccctggcacccactggaatcatgcccatgactgctaaagctgcaggggacttccaggtcttttcagggatatgggtgagtgtatttgttgtctgttgctgcaaagcagattgccagaaattcagtggcttaaaacaacacacgtctatgatctcacagtttctgtggatcaggagtccaggcacagcttagctgagccctccatctgaggtctcagaaggctgctgtcagacacggatcaggctgcactttcatctggaggctcgactggggatgaatctacttctgagttcatccaggttattggcagagttcgtttctctctggctgtgtgactgagggtcctggccttttgcttgctgtcaactgggagcctccctcaggtcctagaggccacttgcatctcctggaggccacccacagctccctaccacgtggacttcctcaatgtggctgcttacttcatcaagccagcaaggctccctccctctgatcttctaagacagagtcttagataacataaggcaagctagggagtgacagctcaacacctttactgtgtgctattggttagatgcaaggtcacaggtctgtccacactggaggagaggggatcatacaaggcatggacaccaggaggtgggaagtcactggggtcaccttaggagctgccctgacagccttggagcactggggcactgacagcctctgctatgggttgtgagacttcagtgctgcgaagaacaaaccccttgagtgtgggacccgtgcttgactctctctgtcccacctccagctcccatacaatgggggcttctatgggttgcaggcattggggggctccctgggacctggggtgggcgcttcaggtctcctttcaccttccaaccactggccccttcccaagctcactgtgtgacctcaggcaagttgcttgaagcttctgagtcttgatgttctcagctgcaaaacaaggttaacagtagcaccagcctcttgggtgatcgtggggacatagcacttacaaagggtttgagttttgacctcaccaggaagtccccaaatgtttgctatgattatcattattattgtctacctctggttcccagggaggcctctttagttctcagggaacgctccctcattctgcaggaatctttgagcatctgggcaccacatgaagccttaagtgttttggcaacagtgtctggtacacgaaggatgagccctgccctatcctgggggcagaggttctgttctgggagagtttcatctctgtccagtcatggcttcactgcactattagggcaatgaattttaatggcatgaattatttttcactcttgcactctgctgaacagtgtgtgatttctgggaacagtcaggcctggtgattcctgcaggtcagctgagccaggcctggcaccttgtaccagcaaaagggcctgtctccccttccaagggcctgaggggcctcactccaccacaagagcctggaaaagtggcgcgtgtctggcagtgcctctgacttggggagtggtggctgggcctgaaggcctgggcacagtggggagggtgggcaagggatgggcaggaaaagacagcagggcccagggcagatctggggagcctagaggtgtcctgctcatatcccccatcttgtagttgggggaatgggatgagtgaggaggctatgagttaccacctttagggagacaccccaagaatggcctggttccatctctccctccttctgaagaacacagggcttgggacaggcaacctggtttgaactagaatcaccagcctcagtttcctcatctgttctatggaaattactaatgagttaacagagcagcacctgacccagggaagagctcggtcaccctgggctacggggcaccggggcggaagtgacagaaggggcggctgtggctaagagagaaccggaggccgggtccgcttgtgcaccgggggctcgctttatttcaccaccagcacctgtgtgcttctcctgcccggggaagggtggatgcacttgagcagcgcccccagcagggccaggacggtgaccacgagcagcaccagcttcagccccttgagcacggagtccgccctgccccgcagggccttccttgcctcccgccactgggcatcgttctctctccactgagcctccagcgtctccagactggcggcgggtttgaactgggccacgagctcctgctgcacgaagcacttgtagacggccggctggaaaacctgcagctgcctgccgccggtggaggggtccagaaaggtggtgaagtcctggccggagagctggctctcccacgtcaggggggtgtcgttggcacgccagttgacgggcctgcgaggaggacaaggtcaggtgcagggccagggagaaaggagggaccgacgtctccctgaggaacagaaaataaagcaccgcccagtccccctcctcgccaccccccacggagcactgtgcagccgtcaacagtggggtggaggaggcacagctgggggctcccagggctccacccgttactggccccaccccttactggctcccctcttcctggctccaccccttactggccccaccccttactggctgggtgacctgggcaaatgcctccagctctttgaacttccatttctttatgtaaaactaagagtctagaccaggcttggtggctcacacctgtaatcccaacactttcagaggcaaaggcaaggaggatggcttgagcccaggagttcagaaccagcctggacaacaaagcaagaacccatgtctgcaaaaatttaaaaaattagctggacatgctgacatgcgcctgtggtcctggctgctcaggaggctgaggtgggaggattacttgagcccaggaggttgaggctgcagtgagccagtcacagcactgcactccagcctgggtgacagagcaagaccctgtcccaaaaaagaaaacaacaaaccaaaaaaaatggagagtaatgattgtacctcataaggttatttggaggagttagcaagggcactccttaaatgatttgtccacctgcctttgcctgtctggtctcatctccttcactctcccctttactcactctgcctagccacgctgctctcctagatgttcctctgacatgctgggtgcagtcttggccctggctgttccctctgtccccagggcttcctcgcctcctttcagtctgggctgaaatggcagcttctcagaggagccttccctgaccccaccacttgacacttttaacctcccctattcccagcatcccttcctgctccgtcaccatccaaaatactataggtcgggcacagtggctcaggtttgtaatcccagcactttgggaggccgatgtgggaggatcacttgagcccaggagtttgggctcagcctgggcaacaaagtgagacctcatctctacaaaacttaaaaacttagccgggtgtggtagtgcatgtctgtagtcccagctactgtggaggctgagatgggagaatcacctgagcccggggaattgaggctgcagtgagctgtgattgtgccactgtactccagccagggtgaaagagcaagaccctgtctctaataataataacaataataataataaaactatatatttatgcgccacaagggcaagaatctccgttggttgtgttcttcactgtttcccaggtccctagaatggagcttggcatataaatatgcagtgaacacgtgtttagtggagaaatgaatcaggcaccgacacacccagcgtggtggaagaacagagaggatattccacagacaatatcataaaagcttgcattcccagctaggtacattgtggaacttcttattggatgctatggcaggcactctacagtctttagtccccttaacacatcacaatgaccctgtgtggccaggggctggcaagacctctgcactgagttagacagtggcccccgcaaaatgcatgtccttcccagaacctcagaatgtaacattatttggaaattggatcattgcagatataatcagttgagatgagagcatattggaataaggtgggccctcaatcccatctgaccggtgtccttttaagaaaaggaaaagagagacagggacacagacacccaggaagaatgccaagtgatgatggaggcgggcattggagagaagcagccacaagccagagaagaccgggatctctgactgcatccagaagctagaaaaaaggaggattctgcccagctcactcagagggactgagagggagcgtggttctactgacaccttgatttcagacttacggcctccagaagggtgagacaatggatttctggggtttttttgtttttttgttttttgagtcagagttgtctcgtgatgttgcccaggctggagtgcagtggtgtgatctcggctcactgcaacctccgcctcccgggttcaagtgattctcctgcgtcagcctcctgagtagctgggattacaggcacgtgccaccatacctggctaatttttgtatttctagtagagacggggtttcaccatgttggccaggctggtctcgaactcctgacctcaggtgatccacccacctcggcctcccaaagtgctgggattacaggcatgagccaccgcgcccagcctgcatttcttattaaggggcaggtggactgggggagaggaggggaaggggctattttccagaggctcctggcaggaagtaagaagatgagtgtgagttctgggaggcaggccttgatgggaagccccgggggcaccagcctctcctccaaggtctcactgacctttccagatgaagcaggggcctgttggagcccctaagcttcctgggcttcccccatcacagccccatctgtctgcctgggcttctcccatcccggctcgcaccaccctgggctgtgtccccctcggactgtttaagagcagggcctggcactgtcctgatgaccactacgtggctgaactgcaaagaacgcccactcatccctctgcacatattaccaggaaggatcccctgaccggaagaatctgggtaggggccagaggcagggattccatcacctgtacatggatcctaagggacagtcgagccacacaaattctgtcttctcatcgagcctgaagttgtcaaaaatgacgtaatccacccttaactgtgtgttattggtgcactggacgtggcaggcttccacctgcagctcaggccgcaagcggctagaccacaccagcacctctcccagatagagccagcagggcatggcttcctccagaggctcctcaatgtagcggtaccccaggcgtttacactcgcccggctcctcacagcggttgcagtcctgccagggctcccaccaggtaaaaatgagctgtttgctgcccaaatgcagggtctcgttctgcaggggcctctgacccaggtccttgtgtgttatatgcagggtggtgacatcctgaaagtcaatttcatactgcaccacttggcggccattcttgttccagcagtggtagaggcccgtctgggagggcaatggatctttaatgagaaggctgccctcgggcattatttccatattggaaatattggtgaggctggtgagcctgcccttcttgccttgtgtgaataaatagtaccagtgcgcccccgaggagttgcaatacaggagaatatcattgcctgagagtagggcctgttggcactgcttaccactggggcagctgatggaaaagtagaaccccagtgccggggcagcaaagtggagcagcagccacagcatgggtggcatggtggactggggctgtggcagtgggctggtgccaccccgaacattgtgaggtcacccatgaactctggcctcagccctgggcagtgggatgaattgcagctaccacatgtgtgtgtgaggtcaccatccccttttgttttgtgacaagctgacaacactgtttttcttttttttttttttttcagacaaggactcgctcttttacccaggctggaaggcagtgctgcaatcacagctcactacagcctcaaactcctggaatcaagtaatcctctcacctcagcctgttgagtagctgggacttcaggtgcatgctaaccatgcccagctagtttaaaattttttctgtagagacggggtcttgttatgttgcccaagctggtctcgaactcctggcttcaagccatcctcccaccttggcctcccaaagtgttgggattacaggcgtgagccactgtgccccgctgaccatatttaatttctattccaagccctccattttgctgggaaaggagcaaacttaatttgtctattcagagttttctctactacctgccccgcttcctttcccaggggtgagactacattcccagggatgaaataagagcatgaaggtgtcacatgtgaacactcaacacatatttcctgaactcttactatgttctgggcacacttcttagcactggggataaagcagtaaacaaatcctctcgggctgggctcggtggctcatgcctgtaatcccagcacttttgggaggctgaggcgggcggatcacctgaggtcaggagttcaagaccagcctggccaacgtggtgaaaccccgtctctactaaatagctgggtgtggtggcgggcatctgtaatcccagctactcaggaggctgaggcaggagaatcacttgaacctgggagacggaggttgcagtgagccgagatcgcaccgctgcactccagcctgggtgacaagcgtgaaactccatctcaaaaaaaataataaaaatttaaaaaaatttatctctggttactgttctgacctcctgcacctttccccctactccctaccctccaaccacgctggcctcccgctgttccctgaatctgtcaggcaggcagaggggctcttgccccagaaccattgcacatgctggtccccgtctcttccctcagccatctgcatgactcaatacatcttcaacaaatatttttctcagttgctccctttccttccatccccttttctaaacaccttctcaggcggtggctcacacctgtaatgccagcacttgccagcactttgggtggccaagatgggagaatcacttgaggtcaggaattcgaggccagcctggccaacacggtgaagccccatctctactaaaaatacaaaaaattagccaggcatggtgtcgggcatctgtaatcccagctactcaggtggccgaggcagaagaatagcttgaacccaggaggcagaggttgcagtgagtgcagattgcgccactgcactccagcctgggtgacagagacactgcctcaaataaataaataaataaataaataaattaaatgatcttccagacttttcccaacatagaaaaagatggaagatttctatgagacttgcatcaccttatctcaaaaccttataaggacattacaacaaagaaaaacctcaggtcaatctcttttgtcaacacagacacactatcccaaagaaaatattgcaaattgattccagtgattttctttacacaaggataaatataaagaccaaattgggttatttcaggacggcaaatttgggttatatttgcacatcaattaatgtaattcaccacattaacagaataaaggagaaaaaccatattattatctcagtagatacagagaatgcatctgataaaactcaacattcatttatggctcaaaacttttggcaaactaggaacaaaaggaaattttctaagaagataaagtgtttctattaaaaacctaggacaggccgggtacagtggctcacacctgtaatcccagcactttggaaggccgaggcgggtggatcacctgaagtcaggagttcgagaccagttagggtaacatggcgaaaccctatctctactaaaaatacaaaaattagccgggtgtgatggtgggtgcctgtagtcccagctacttgggaggctgaggcaggagaatcatttgaacccaggaggcgaaggttgcagtgaactgagattgcgccattgcactccagcctgggcaacagagtgagaccctgtctcaaaaaaaaaacaaaaaacaaacaaacaaacaaaaacacctagggctaaattatacttcatagtaaaatactaagaataacacaagtatttctgccatcaacttttccattcagcattttactggaggtaagatacaagcaaaaaattagatataaggtcatatattaaatatgatttatataccagcaacaaagaattaaaagatgaaacttaaaagattactataggatagtatgaaaaaattaaatacctaggaataaatataataaaagatatgtgagtcctctacattaataacttcacattattgggagaaattaaagaaagactaaacaatggaagtatttgccacattcacggattggaagactaaatattgaatatatattgatttaccccaaatttatctttagattcaataaagtcccaattaaaaaaaaataagagttttggggtggaaactacaaaccgattccaaaatttgtatataatgggccaagaataaccaagacaatcttgaagaacaaagttgggaaacactaccacatattgtgacttattgaaaggtataaaaagacactgtgggctgggtgcagtggcttgtgcctgtaatctcagcacttgggaggccaaggagggcagaatcacttgaggtcaggggttcaaaaccagcctggccaaccccttctctactaaaaatataagaattagccgggcatggttgcggatgcctgcaatcccagctacttgggaggctgaggcaggagaatcgcttgaatttgggagatggaggttgcagtaagctgagattgcgccattgcacttcagcctgggcaacagagggagactccatctcaaaaataaataaacaaataaaaggaaaaaaaaaaaagaaaaccaaagacactgtggcattgggacaaggatggatagataaattgtatccagggtccaatcaggagacagaaacatcagtgtctacattgtcatgagcccatgggcctgagtagctcggtctctagattctacatttggcctccccctgaatatcagaagcctgtgcagacaagaactaggtcattgctgtgtccctaacatcacctgcccagggcacactcagaggaaacaccagggaattcttcctgcatgcgcatctcagcaagccagtgaggagaccttttccttagcagaaccaacatgaaggcttatgggctgggagacggagcccggttttctgttggaaggtaacccatgagcccaggtgaacacagaaaacaaagtctgggtgagggtcaagggcagggctacggccctggtcctgtcacctgtagatggaggccaaggggcaggtgagccacctgttgttcatccacttgccaggctggtaaaaatcaaagatgaggtatggctagtgaatttccttgacggggttgcagggtacgtggcaggcttccacctgcagttcgggccgcatgcggctgaattgcatcttctcatctctcagatacagctggcagggcataggtttttccacgggctcctcaatgtagcagtaccccaggcgtctgcactcacccagttccccacagcggttacagtcctgccgggggtcccagtgggtaaagatgagtaccttgccatccaggatcagggtctcattctgcagggacttttggtccaggctcttgtgcgtaacatgaagggtggtgacaacctggaagtcgatctcgtattgtaccatgagggtatcatcattgccctggcagcgatagaggccagtctgggagggctgagggttggtcaattgaaggctacccccaggcagtttccttatgtcaggcattgaattaagcagagaaggatcttccccaagaatggaagagaagtaccagagtgccatgggatggtcacacttcaggacagcatcactgcctgagagtagggctcgctggcaaaggtccttgtaggcacagctgattaacatctaggctcacagagtggggcaagaaaggctaagcagccacagggtgtccagcatagtggaccaaggctgtagaaggaggctaggaactccctggccattgtgaagtcactcacaaaactcgaggatcagcctaggcaatggaatgaaacttgatccactgtgcttccaggagtacaattcagttcgtgtcatcaaatggcttgtcataggttgtagggtcgaaggtcaaatatccacatgagctaggcaggaaacaaaatgggtgagcttaaatcagaacaaacgaactacaaaggcaaattattggccctccacatacccaatatataatgatggaatgggacaaaatgactttatgaccatcagaaagtggaagaagaggcagggcccagtggctcacacctgtaatcccagcacactttgggaggctgaggccggtggatcacctgaggccaggagttcaagaccagcctgaccaacatggtgaaaccccgtctaaccccgtctctattaaaaatacaaaaattagccaggtgtggtggtgcatgcctgtattcccagctgcttgagaggctgaggcaggagaatctcttgaacccgggaggcagaggttgcagtgagctgagatccaccactgcactccagcctggacaacagagaaagactctgtctcaaaaaaaaaaaaagagaaagaagaaagaaagagagagagagaaaaagaaaagaaagagagagagagaaagggaagacacacagaaatcactgctctgtaccacttctgcaatccagtgggaaaacattacaaggaccccctatcttgtagatgggaaagattccttaactagcaccgaagcagctccttgttgtgtgtggggagggtagggggattcccaaatcattgttctctgtgggtcatgtctcactctccagggaaatatctccttttctcatattctccttggctacatctgaagatgtgccctccttgagacaacagcagtttactcagcctgctttctatctcccacagtttgggacctacggttcttataagcctctagtcaactaaatatgtaaacaaacaaacaaacaaacaaacaaaaacacacacatagccgtagttctgttcgagatgttctcaggctgggctcggtggctcacgcctgtaatctcagcactttgggaggccaaggtgggaggattgcttgaagccaggagttcgagaccagcctgggcaacatggtgaaaccctgtctctcctaaaaatacaaaaattagccaggtgtggtggtgggctcctgtaatcccagctacatagcaggctgaggcaggagaattgcttgaacctgggagatggaggttgcagtgagccaagatcacaccactgcactccagcctgggcaacagcacaagactctgtctaaaaaaaaaaaaaaaaaagatgctcttatcctctctctctttctgtctctttctcatttcaggtaccttaaactctatcagccatccttggcgagctatatctcttaactctctttcatggagacatttgtccacctgaaagcgttttctggtagtatcttaattcattcagagaatttttaaacaatgggtaataattatttacctaggcttatacttttgattttatccttgtcaaaagctgaattctaattggactttatctctcaaagcccttctcaatttttagctaactttggccaacttatactgctaacatcttatattccagcagcttccttgaaagctacaagtccattaaatacattatctgccttccagagtatctcaggcaacagcctccatccttctggtttcaaataagtgtcttagtcccaaaggtatctaagccaatgctgtctttttatttttgattacctcagcaccctactcctgatactattttggt[138 bp omitted]cctgtctctactaaaaatacaaaaaatgacaaaaccctgtctttactaaaaatacacaaattagccaggtgtggtggcatgcacctgaagtcccagctacttgggaggctaaggcaggaagatcacttgaacccgggaggtggatgttgcagtgagctgagatcatgccactgcactccagcctgggtgacagagcaagacttcatctaaaaaaaaaaaaaaaaaaattccccccaaatctcaaccacataaaacaactaaggtttactttttactcattgtgcattggtattggaatcactcaggaatccagggtgatggcgcaactgccatctcaaacattttcagtttcttccaaggagaaagaaagagctctctgtaagattttgggtctacattaaatgctttgcccttaagtaacacatgtcatgtcgcttgctcacaaaccattggctagaaacagctacatggcacca[136 bp omitted]aaaccccatctctattaaagatacaaaaaaattcgccgggcgtggcggtgtgcacctgtagtcccagctgctggggaggctgaggcagcagaatggcgtgaacctgggaggcggagcttgcagtgagccgagatcgcgccactgcactccagcctgggcgacagagcaagactccatctcaaaaaaaaaaaaaaaaaaatggaactctactatttccaggaatcttttggcaaatggcagtaatgatttccatggctaatgtctattacaagggatttttcctctggtgttctcctttatatcacagagttaaaaccatttccaaaatcctcacatcagctctcccctaaagttctactggccaggattggggcccatgcccaggtctaaaccaatctctgaaaataaatgaagcttacatcgttggcttaaaccaattagaatttgttgcctaggattgggtaaggtcagctttttcttagcagaagccactgaagacccagacaaaatcagggttttgtatgcaggggagttgtagaaaagaatgctgatttggtgtagccaaccatgtcttccacagcattgactgatgggaaaatattagttgtaccagaattgtgccaggcactgtgtgagccacatgaccccaggcaagttgctgagactttcctttttttttttttttgagacagagtctcactctctagcccccaggctggagtgcggtggtgcaatcttggttcactacagcctttgcctcccaggttcaagcaattctcttccctcagcctcccaagtaggtgggattacaggcatgtaccaccatgcccagctgatttttgtatttttagtagagacggggtttcaccatgttgaccaggctggtcttgaactcctgacctcaagtgatctgcccgcctcggcctcccaaagtgctgggaatacagatgtgagccacagcacccggccagaactactggagactggtaaatttataaggaaaagaagattaattgactcacagttctgcatggctggggaggcctcaggaaacttccaatcatggtgcaaggcgaaagggaagcaggcaccttcacaaggtggcagcaaagagacagcaattagggaactgccagctacttttaaagcatcagatctcatgagaactccctcactgcacgggagaaaccactcccataatccaattaccttccactgggtccctcccttgacctgtggggattacaattcaagatgagacttgggcggggacacaaaaccaaaccatatcactcatccaccttgcaccagacaccaaggatccaggctaagtccctgacctcttggagcttacatcctagtggggatgtattagtcaggataggttaagttatgctatgtaacaaaggattctaaaatcttagtggcttaataaaattttttttcatgcgacatgtccaaatttggctggggagagctatactccacaaagtcccttcagatactgtggctaacagaggtggtaccatctgcaacatcattagttgctatggcaggataagggagtatagcaaatcatgaactggcaattgaatgctttggtcagtgatatggtttggctgtgtccccacccaaacctcatctcatattgtagctctcataatccccacgtgtcatgggaaggacccgatgggaggtaattgaatcatgagagcaggtttttcccatgctattctcatgatagtgaataagtctcacaagatctgatggtttttttctttctttctttctttcttttttttttttttttttttttgagggagagtctcactctgctgctgcccaggctgaagtgcagtggcacgatctcagctgacagcaacctctgcctccctggttcaagcgattcttgtgcctcagcctcctgagtagctggaattacagatgtgcaccaccatgcccagctaattttcatatttttagtagagagggggtttcaccatgttggccaggctggtcttgagctcctgacctcaaatgatccacctgcctcggcctcccaaagtgctgggattacaggcatgagccaccatgcctggtgagatctgatggttttataaagggcagttcccctacacacagttgcttgcctgccgccatgtaagacacgcctttgctcctcctttgccttctgccatgattatgaggcctccccagccatgtgcagctctgagtccattaaacatctttttctttagaaattacccagtctcagatatttcttcatagtagcaagcaaatagactaatacacagatggtaaacaaataaatgactaataaaacatcaggtcatggtaaatgctttgaagaaaaaaagaaggcgcaaagagagattggggatggagactattaggggatgaattatgaccccacaagttcatatgttgaaacactgacccccaatacctcagaatatgactgtattgggaaacagggcttttaaagaggtaattaagttaaaatagggttgttagagtgggttctaatccaatatgactagtgcccttaaaagatgagggaattagaacccaggcagagggatgaccatgtgaggacatagtgaaaagggaaccatctgcacaccaagaagaaaggcctcagaatgaaaccaaacctgccaacaccttgattttggacttctagcttacagaattgcgaagaaataaatttctgttgtttaaaccacccagtctctggtgtttgttatggcagccctagccaactaatatagagactattttatttttatttattcatttgttttgagacagggtctcattctgtcacccaggctggagtgcagtggtgtaatcatagctcactgcagcctgaaactcctgggttcaagtgattctcctgtctcagcctcctaagtagctaggactacagggacgtgccaccatgcctagctaatttttaaaatttttggtagagatggtagactggataaagaaaatgtatacaccatgtagaggcttgtcttaaacttacagcctcaaactatcctcctgtctcagcctcccaaagtactgggattacaggtgtgggacaccatgcccagcctgtggggagagaggtaggtgagaagagaaggcttctctgaagaagtgacatttgagcagacctatataagatggttatgaagattcacacagcggctcatgcctgtgatcccagcactttgggaggctgaggcaagtggagcacctgagatcatgagttcaagaccagcctggccaacatggtgaaaccccatctctactaaagatacaaaaattatccaggtgtggtggtgcacgcctataatcccagctactcagaaggctgagacaggagaattgcttcaacctgggaggtggaggttgtagtgagctgagattgtgccactgcattctagcctgggtgacagagtgagactctgtctcaaaaaaaaaaaaaaaaaaaaaaaaaaatccagagaaagcaaggtctgaactaagcacaccgcacatgcaaaggtcttgaggtgggaacaggtttgctatgtgaatacccatcagccaaagacaatcaggcatgcacctatgaacaaagttaggttttttgacttgctgcagtgagggcagatgtacaccatggggaatggtgtggtgtctcaggaaggtgtcagagaagactaacagaatttgggctgtgttgtatgattgtgggaaggattcaaagaagtggggatttgctttgggttgggtgctatcaaaaagtgtaaccaattcttttttttcaaacttttgattttaagttcaggggtatgtgtgcaggtttcttatagaggtaaatttatatcatgggggtttgttgtacatataatttcatcacccaggtattaagcctagtaccccttagctatttttcctgatcctctccctcctcccacactctaccctctgataggctccagtgtgtgttgttcccctttatgtatttgtgttctcatcatttagattccacttataagggagaacatgcggtatttagttttctctttctgcattagtttgctaaggataatgaccttcagctccattcttgttcctgcaaagggcatgatttcattcttttttatggctgcatagtattccatagtgtatatgtaccacatttttttaatccagtctaccattgatggacatttaggttgatcctatgtctttgctattgtgaatagtgctgcaatgaatataagtgtgcatgtgtctttatgatagaacaatttatatttctttgggtgtatacccagtaatgggcttgttaggttgaatggtagttctgtttttaggtctttgaggaattgccacactgtcttacatgctaattaacactcccaccaacagtgtgtaagcattcctttttctctgcaacctcgccagcatgttgttttttgactttttaataatagccattctgactgatgtgagatggtatctcatggtggttttgatttgcgtttcactaatgattagtgatgttgagcttttttatatgattcttggccagatgtatattttcttttgaaaagtgtttggtcatgtcctttgcccaccacgagtgtaaccaattctatcttttctagaaggtgagaagaacggagcaaagctaaaactgaaattggtaaagaaacagcagccattcagatcagctgagagaaggggatgcttgatattttgtggtttggacagtgttcctgttttgtctctgtgcaggcataattacagagcagtcttgtttctatctagatgcatcagagtcacagacaggcctttgttgttgttgttctgtgaacattgttcaccttcaacaggagaacatcatgacctaacagtgcattctagacaagctgctagcaacaccaagacccagttgttactgttaggccagctcccagctgttagaggctgctttctctttcttacatagatgaggaacttcagtgaagtctcttccagcaatgaaagactgatcaaatggctttcactctgtgaccctccgtttccttattttcaaaggattttaattgtactggccacatagtgctcttgtgtggatttgatgagatgttatctataaagtatcagccagtattattatctaggggttagcaatatggactcatcctccaaatatcagagttctgtgttgggactctggattactacttctgatcatggttgtgcagacacagggggtgggccatgattggcttaatccccaccagctgaactggcttccagaaggtataaagggatagccactggattttctccccttttgttccctttggaaggtggacatttagggattaggatattcaaaagcaactgtgcatacaagggaatttagaaagtcactgcacaagctcagggaaagatgcaaattcagaaaagacctaagatgatcataagctttcattttaggttgattctagcacagatacatcttataacaataaacaaacaaaaaaaccagcaaaccctggggaatggggaaaagctgatttccagagttagcacattgtaagattcaaatgtccattttcaacaaaaaagtcacaagacatacatacaaagaaacaagagagtatggcccattcaaagaaaaaataaataaacaatacctgaggaagcccaggtggtagacttactagacaaagacataaataactgtctcaaagatgctcaaacagctaaaggagacatagacgaagacagaaaaatgatgtatgaacaaaagaagaatatcagcaaaaagacagaaaatgcaaaaaggaaccaaaaggaaaattctggagctaaaaatacaattaactgaaataaaaaattcactgaaggggctcaaaaacagatttgagcaggcagaagaaaaatcagcaaacttggtgacaggaaaatttattgagtctgagggacaggaagaaaaaagattaaagaaagctgaacagagcctaaaggatctgtgggacaccacagaggagaccaacatacatattatgggaggtccagaaggagaagagagagaaaaagaggaagaaagaattgtaattttaagaaataagattgaaaacttcccaaatttgatgatagacatgaatcaacaaatctaaaaactcaataaactccaagtatgaaaaacccagagattcaagctgagacacattataatcaaactgtaaaaagccaaagccaaagaaacaatcttgaaagcagcaagagagaagcaacttgttacattcaagaaatcctcaataagattattggcagatttatcattagaaaccttggatgccaaaggcagtgggttaatacacttgacatgccaaaagaagaagaagaaaaaaaagacctatcaaccaagaattctatagctacccaatctatcctccaacaatgaggaagaagttcagatattcctggataaacaaaagctgagggagttcattaccactagtccttccctactagaaatgctaaacgaagtccttcaggttgaaatgaaagagtgcagacagtaatttgaagacatgaagaaaaaaattaaaatctctgctaaaggtaaatacatgagcaattataaaagctactgttatcataatttgagtttataatttcactttttattgtctacatgatataaaataaaatggatgaaaacaattattaatcttcattattgggaaaacaatgtatataggtgtgatttgtgacactgacaacagaaaaggaatgacagaggccaggtatggtggctcatgcctgtaatcccagcactttgggaggcagaggcaggtggatcacttgaggtacctgaggtcaggagttcaagagcagcctggccaacatggcgaaatctcatctctactaaaaatagaaaaataaaattagccgagcatggtggcagacacctgtaatcccagctactggggcggcagaggcagcagaattgcttgaacccaggtggcagaggctgcagtgagccaagattgcaccattgcactccagcctgggtgacagagcaaggctccatctcaaaaaaaaaaaaaaagaaagaaaaaggaaaaggagtgacagagctatataagagcagagtttatatatatactatcgaaattaagctggtataaatgtaaattggagtattataattttaggttttatatataatataatctcctctataaccacaaaataaaaagctacaaaatatacacaactggaaatgaaaagagaatcaaaacatttcgctacaaaaaaaaaattaaacataaacagtaatggagaaaatgagggacaaaaagccataaggtatatagaaaacaagtagcaaaatggcagtaattttgctgatagtcatttctttaaatcaagatggagatttccagaatgtatttttaaaaaccacccaacaatacgctgtctataaaggattcatgttagatccaaaggcacgaatatgttcaaagcaaaagatatggaaaatgatattccatgcaaacagtaaccaaaagatagcttgagtggctatgcgaatatcagacaaaatagactttaaatcaaaacaatttacaagagacaagacagacattacaaattaataaaaagttaaatatctcaataagatgtaacagttataaacatttctgcacctaataacagacctcaaaatataaagcaaaaattgatagactcaaaggagaaatacacagttctaccataatagttggagagttcaaaatcccactttcaataatggatagaacacacagacagaaagtaagtaaaaatatagtggacttgaacaacacaaaaaccaactagacctaacagatacatatggaacactcacccaattaaaaaaaaaatccaagtacacatgagacattctctatgatagatgacatgttgaggcataagttaaatctcagtagattttaaaatacctatcaaacgaactcttttctttgatcacaacaagataaagttagaaatcaataatagaaggaaaaatgaaaattcacaaatatgtgaaaattaaacaacattctcttaaacaaccaacaggtcaaagaagaaatcacaaaggaaatcagaaaatacttagggacaagtaggaaagaaaacaaaatataccaaacttatgagatgccccaaaaacagtgctcagagggaaattaatagctattaatgcccatgtaaaaagaataactatctcaaattaataacctgacttacatcttatggaactagaaaaagtagagcaaacaaaacccaaagccagcagaagaaaggaaataatagagactagagcagaaactcataaaatagagaaagagaatagacaaaaaaatctgtaaaaccaaaagttggttttttgaaaagattaacaaaattggcaaacctttggtgagactgatgaagcaccaaagagagaagacgcaaataactaaaatcagaaatgaaagtggcaataccactaattttaaaccacctagcaaagaaaaatcttaaaccagatggcttcatgagttagttcaaccaaacatttaaagaagaattcacacaaataattttcaaacttccaaaaaattgaagagaaggaaacactttctaactcattctgtgcagccagtattaccataataccaaagccaaataaagaaatcactagaaaagaaaattacagactaatatcccatatgaatatagatacaaaaatcctcaaaaaaattagcaaatcaagttcattagcatattaaaaggattactcaaatatccaagtatgatttatgcaggaatgcaagggtggttcaacataagaaaattaatcaatgtaatacatcacattattagaatgaaggtaaaaaacacacacatgatcatctgaattaatacagaaaaggtatttgacaaaattcaacacaccttcatgattaaaaaaaaaaaaacagaaaactaatcatacagggaaaattcctcaatgtgataaagggtatttatgaaaaactcacagctatcatcatactcaatggtgaaagattgaaagctttccccctaagatcaggagtaagacaaagatggccattttcaccatggctattgaacactgtattggaagttccacccagagctatcagacagaaaaaggaaataaaagtcattcagattggaaagaaagcagtaaaactatctctattcacagatgacacgatctatgtatagaaaatccaaaagaattcacaagacagctactacagttaataaacaagttgcagggtaccagatcaacacacaaaaatcagtcatgtttctatgcaccagcactgaacaatccgaagaggaaattgagaaaacaatttcatttacaacagcatctaaaacaattaaatacttaggaataaatctaaccaatgaggtgaaagacttgtacactgaaaatgacaaaagattgctaaaataaggcctggcacggtggctcaagcctgtaatcccagcactttggaaggccgaggcgggcggatcacgaggtcaggagatcgagaccatcctggctaacacgatgaaaccccatctctactaaaactacaaaaaattagccgggcgtggtggtgggcgcctgtagtcccagctactcaggaggctgaggcaggagaatggcgtgaacctgggaggcggagcttgcagtgagctgagattgggccactgcactccagcctgggtgacagagcaagactcagtctcaaaaaaaaaaaaaaaaaaaaaaaaagattgataaaataaattaacaagtatctaaataaatggcataaatggcaagatgtgttcatggatagaaagacttaacattaaaaatgtcaatactacccaaaacaatctacagattcaacacaatgctgatcaaaattccaacgtcttttcccaaagaaatggaagcagatcctcaaattcatatggagttttaaggggcccccaataaccaaaacaatactgaaagagaagaataaagttagaggactcacactttccatctgtgaacttactacagagctatagtaattaaaacatatggtacttgcataaggataggcgtatagatcaatgaaatagaatacagaaccgagaaacaaaccctcacatatatgattaattgatttttgacaaggaagccaagaccacttaatgggaaaaggacagtgttttcaacaaatggtagagggaaaactgaatatccatatgcaaaaaaatgaagttggacccttctaccacatactaaaattaaaatggcccaggccgggtgcagtggctcacacctatgtgagcactttgggaagccaaggcaggtagattacttgaggtcaggagttcgagaccagcctggccaacatggtgaaaccccatctcttctaaaaatacaaaaattaacccagtgtggtggcatgcacctgtaatcccaaatactcgggaggctgaggcatgagaatcggttgaacccggcaggtggaggttgcagtaagcggagatcacaccactgcactccaacctgggcgacaaagtgagactcagtctcaaaaaataaaatgaaataaaataaagtggctcaaagactcaatttaagagttaaaactataaaactcttagaagaaaatattgttgaaaatcttcatcacattggacttggcaacaactgcataaataggataccaaaagtacaaggaagaaaaaatagtaggtaaattgaacttcatcaaattaagaacttttgtgcaccaaaggacactatcaagaaagtgaaaaaacctggagaatggaagaaaatatttgcagatcatatatctaacaagggattaatattcaaaatatatatagaactcctacaacttgacaacaaaaaaacaaacaacccaattcaaaaatgggcaaagtacttgaatagacacttctccaaagaagatatactaatggacaataaattcgtggaaatatgctcaacatcgttagtcattggggaaatgcagattacaaccacaatgagatgccacttcacactaaccaggatggccataatcaagaaaatggataataagttttggtggggatgtggagaaattggaatcctccgtgcattgctggtgggaatgtacaatagtgcagtcattggggaaaacagtttggcagttcctcaaaaggttaaaaatagaactaccaagtcacccagcaattccattcttaggcatatattcaaaagaaatgaaagcagatatttgtacaccagtgttcacagctgcactatttacaatagtcaaaaggtagaaacaacctaggtccatccacaaatgaatggataaataaaacgtagcatatacatacaatggtacactagtccgctgtaaaaagaaattttgatcttactgcatgctacatggcttcgacatactacaacatggatggaccttgaaaacattattctttgtgaaataaactagacacaggacaaatgttagacgattccacttatatgaggcacctagaatgggcaatttggtaagcaaagtagaatagaaattactaggggcacaggtagcagggaatggggagttactgtttaatggtcacagagtttatgttggggatgatgaaacagtttcggggataaagagtggtgattggtacacgacattgtgaatatacttaatgccactgaattttacacttgaagtggttaaagcgataaatattatagtttgcatattttatcataaaaatatttttttaaacgatgaagggacgtgaacgggttgaaattttataaaaagtggccagggaaggtgtcactgcaatggtgtcctacaggaggaggaagatcatgtggacatctgcgggaagggtgttctggcagagggagtagcacgggcgatggctctgaggactgtgagaagtatagttggaaacagcgaggaggccagggtgtccgaagctgagtaagccagagagagtgggaggaggtgagataagagggggaaggtcagtttctgctgagagtgaggaggagccacaggagggctgtgagcaggtggacgtgatctggcttgagttttaacagggccagtagaacaaagcacgcctgggtaccgaaaccagccactggccagttggcaacctgggggagtctaacgcgaggaagcgcccagggttcccccaggatgcgctttccctcgccgccacctggagacagcagagtcacgcccagcgctgcgcaggctgatcgccgcgccgcgcccccgccctcggtcgcaggtggctcgttccgggaattcctaagcggaaaccggtcccaagccccgcgccttcgctcggcccctttaagagccagaatttccggagggctgacccgggggctagggatgcccaggggccgaaccacaagttgggaacgggtgggggaggtggcgaaaacttccgaagtggaattccaacttttcctggccctgattccccttgggcatccctgagggggcagagcttcccttccggggactttagagggttcctcaggtcatctaactgggagacacaggaggcccgaagcgccccccctccacccggtccggaggaaccccagtggaagtggagaagtcaggcgccaccaacaagcctctcccagccaggactttgcttagactcgctcctcccggcagggcgcacctaggcgggtccatcgccagccggggagaggggtttgggcagggagggaacaggtgcgcggcgggacccgccctatctcaacaggtgaatcgctccaagtgggtctcggttgcatggatctcggtgcgcttggtttggccggagcagatgggggccggaagggacctgtggtccgcaggcgccctcccagcgggccagtcacttggttcgggccctgggggacggagcgcacctgggtcagcccacttccggggagggaggcagaggaacccctccccgccgctcacccctaagcccagccctcggctcccacccttgtgtacctgggccgaaccattcaccggagcgcgcagcgggtggagtgtggctcggaggaccgcggcgggtcaagcacctttctcccccatatctgaaagcatgccctttgtccacgtcgtttacgctcattaaaacttccagaatgcaacaggacggacttggagtagggacaaggaacggaagtgggaaggggaggagcgtgcacccctcctggccttggtgcgcgccgcgccccctaaggtactttggaagggacgcgcgggccagacgcgcccagacggccgcgatggcgctgttggccggcgggctctccagagggctgggctcccacccggccgccgcaggccgggacgcggtcgtcttcgtgtggcttctgcttagcacctggtgcacaggtacggggcacggggcctctgacgctgcggaacgccggagggaactgtagagggggatggatggagttggaggcggcgggaagcgggaagcgggggtctcagaggctgggaccttccgatcccctgggtcttgggcgatctgttgcgcgcgggagtgagaggaattccccatttgtgccggggagcgctccccgcgcccttatctggaagatagcaggaagtgaaactccctggacggtgagacccggagcggcagggagaatggaactctttgtggggagggagtggaagaccgcccgatctctgggaaaagaaaagccgggatgggacttgggcgcacccggggatttctaagttttggagtaacggggagagggcacgggagggctggatcagacgcttcctagagggacagagacgaaggaacaatgcctaggcctcgggtgggtgtgggactggggactccccatcccccgcaccccacccacctcccgcgggctccggattatacgtgcgtaagagtctggtgggatggatttacggacttgaaaccgacttctgctggcaggctttcacctggatgggatatttgggtggtgatgaggtctttcccgagacacttttggttcagtcatttgaaatgactttagagtagggtgaggtggtgggaggctgatggagatattgtgggggctttagtccctccatggcaaagcagttcaggcaaacaactccatggttttccctccaaattcaaaaggccccgggtaacctggaatccttcgtagtcggttttgaagtggggccttgggcgctgggggcatcaacatggccatctgggcttgcctgcccaggccacacagaggccccttgttgtgggtgaatggcaaagggaagaggggactggtgtggttcagaggccacaggctgggaagagggatggcgggcgagtccaaggaaactggccgtgtcaccgtgcacctgccacttcagccccacgggtctataaaatgggcatgattatcgtggctacctcactggtcctggcaattaaggaacaatgtgtgccaggcactctgtaaaccacatacttgcgagtgtcaagctggtgacaggtggcgttcctgttgaagcacctccctgagctcacagcaacccttgctgtctctcctcttgccctcagctcctgccagggccatccaggtgaccgtgtccaacccctaccacgtggtgatcctcttccagcctgtgaccctgccctgtacctaccagatgacctcgacccccacgcaacccatcgtcatctggaagtacaagtctttctgccgggaccgcatcgccgatgccttctccccggccagcgtcgacaaccagctcaatgcccagctggcagccgggaacccaggctacaacccctacgttgagtgccaggacagcgtgcgcaccgtcagggtcgtggccaccaagcagggcaacgctgtgaccctgggagattactaccagggccggaggattaccatcaccggaagtatgttgggcagggcagggggatgaggctgggcttgcccgggtggtgggactggcgtccttgtgcgggacctggagtccccatctgaaagctcttgagtgccagtgtctgaaaggaccattgaagggagcaattctttttttttttttttttgaagatggagtcttgctctggactccaggctggagtgcagtggtgcgatctcagctcactgcaacctccacctcccaggttcaagcaattctcttgcctcagcctcccgagtagctgggactccaggtgcgtgccaccacgcccagttaatttttgtatttttagtagagatggggtttcaccatgttggccaggctggtctcaaactcctgacctcaaatgatctgcccgccttggcctcgcaaagtgctgagagacaccatacccagcctaaagggagcgattctattctactattcttccttctgctaatccttccattctttaatttaataacgaagattttttgagtacctgtcatataccaggtgctgttctgggccctgggaatacagctgttaacaaaatcatcaaaccacttccctcgtggagcccacattgcagtgagagagacaaacacgacacacactctcaagtccttgaagataaagaaaactgggtaacggagagaagaggccagggtttgttctataatcattaataacacgagcagtaagaagtaaaatttatctaagtaacaacttataaagggtctactgtgtgctaagctctcatccaggttcccaaggattaactcagaccacacagtaattgaatagattctatcattgtcatcttacagaggcccagagagagaaagtgacttgcctagtgtcatagctggtaacggggctgggattctaactcagccactttgggtctagtggccaagctcctaatccctttgcttgcctagggtggtccgcagaggactcacagaggagatggcaggagtgaactgcaggggcaagagagcttaatggagaaagcctgtgacatgccaggaactgcacacatattctcccattgagtcctctcctctaccctcctgacagctgaggcacagagaggttaccttgttcaaatgggtgcataggaagtcaaagtctggagctggggtttgaacccaggcagccctgagaaccttgttctttttttttgagacggagtctcgctctgtcgcccaggctggagtgcagtggcgggatctcggctcactgcaagctccgcctcccgggttcacgccattctcctgcctcagcctcccaagtagctgggactacaggcgcccgccactacgcccggctaattttttgtatttttagtagagacggggtttcaccg[140 bp omitted]gttgggactaagtaaggggcagtcattcattcattcatttggtatttatcaagcatcgactatgtgtcgttggtgctggggatagaggtgattgggatggctgaagtttctgtcgtcaaggagatgacattctggtggagtgagactggcagtaaataagcagataaagaaagagtatgagaatttcaaagtctgggcacggtggctcacgtctgtaatctcagcactttgggaggccaaggtgggtggatcacctgaggtcaggagttccagaccagcctggccaacatggtgaaaccccgtctctactaaaaatacaaagattagccaggcatggtggcacatgcctgtaatcccagctactcaggaggctgaggcatgagaatcgcttgaacccaggaggcagaggttgcagtgagctgagatcgcaccactgtactgcagtctgggcgacagagtgagactctgtctcaaaaaaaaaaaaaaaaaaaaagactccgtcaaggtataagaatgtcagagagtactaagtgttgcaaagaaaataacaccaggctgggtgcattggctcatgcctgtaaatttcagcactttgggaggccaaggcaggaggatcacttgagcctaggagtttgagaccagcctggacaacaaaatgagaccccatgtctacaaaaattttaaaaatttaaaaattagctgggcatggtggcatgtgcctgtggtcccggctgctcaggaggctgaggtgggaggattgcttgggcttgagaggtcaaggcttcagtgagtcatgatcgtgccactgcattccagcctgggtgacagagtgagaccctgtcttgaaatgaaaagaaaataggctgggcgcagtggctcacacctgtaatcccagcactttgggaggccgaggtgggtggatcacctgaggtcaggagatcgagaccagcctggccaacatggtgaaatcccatctctactaaaaatacaaaatttagccgggcgtggtggtgggcgcctgtaatcccagctactcgggaggctgaggcaggagaatcgcttgaacctgggaggcgaaggttgcggtgcgccaagattgcgccactgcactctagcctgggaaacagtgagactccgtcttaaaaaaaaaagaaaaaagaaaatagcactgggtgatgtgctacatggaatgacttgggctgtgaatatgatttgaggagggcctgggcctgggccttacagaacctagaaggcagagaggaaggggaggggcagggtgccagggatgaaggctcacgtacctcatgtcttagtgtgtgttcactgtcttaaacaagaatttaaagttgggcatggggcagagcggggaagggagcatccctttgcagaccccaagaagccaggaactggagcacattctgctagaggatcgatgggaagcagggttccaggggctgagcctatgtcagtcctgtttcagaggaggcaccaggcttgcttgccctgaatttctgtgggcagctcagccatgagcatcctactgttattgaggtcacagggctgcttaggccccctcctctctaacccagggattgtgcctgcctggaccaggcgtgactgctaagcttctgccaggacaagccaaatactgagggtgcttcctctgctggacgcaaaagtccaggatgaccccccaggctctgtctcggggaaggggccctgcatgctccaggggcctcacaggcctgggtctttcaaaccacccccacctgggcctgtgtttgatcaaggccctgagtgtaaacatccattgtgtgtgtcctttcaggaaatcccatagccataggagcttcctctgtttcagctttgaggatggggaaaagtggactccccgtggtgttcctagggtcacccactgtgctggggtttttctgttgttgttgttttttttctgttgcccaggctggagtgcagtggtgcaatctcagctcactgcaacctctgcctcgcaagttcaagtgattctcccgcctcagcctcctgagtagctgggattacaggtgcacaccaccacacctggctaatttttgtatctttttggtagagatgggatttcgccatgttggccaggctggtctcaaactcctgacctcaggtgatctgcctgccttggcctcccaaagttctgggattacagatgtgagccaccatgcccggcctatcctggtttcaaaagtgaaaatagtcctggataaggtagaaggctgtccactccaggcatccctccggtccggtggctcattccctgctttgtccttccatgctttgggtgatggaccagcacctggacaggaggccctgttccacctcctcgggctccttggggtccaagtgcccccacctccagctgcactgcagcagagagcccatgggacctctgaaatcatgaaggtcacctttgcggtgtataaagaaggaaccagaggttggagatgtggaggaggcctggctgctgttcccactggagacctggcatcttctccccgacctaaaacaatgaaagcagtgctcagcccggatgagatcacggccagcccaagaccaggaacagggtacgccctgcaggaagaaggtgtgcccagaccttaggatggatcaaaagaagccggaaaactatattttttgtgagttttgaaaatgtcagacaggtcaaacaaaacacagtgaggtccagcctcggcctacaagatgccagatttcaacccctggcctatatgatctgtttgccatggcaggcggttcctgtccacctcttttgtttatagcagggaccagctcttgagctccagtgttgaagaggcacggtcagggtctgatctgaagacactggtggctcatgcctgtaatcccagcacttcaggaggccgaggcaggaggattgcttgaggacaggagctgggagaccagcctgggcaacacagtgagacccagagactacaaaaaaataaatttagcggggcatgatggcacaccctgctactctggagatgggaagattgcttgagcctaggagttcgaagctgcagtgacccatgatcgcaccactgcactccagcctgggcgaccaagctaggccctctcaaaaaagatacaggtggaaaaatgatggacgaagagggcattgtggcaaacctggggatttaggagaacctagtttggaattctatgaggattcaatgaaagaatgtgtgtagaggggccca[131 bp omitted]gcaagatcccatctcaaaattaaaaaacaacaccaacaacaaaaaaacagtggcttagatgcctgatcattagggtaagtcgtgtcctcaaccccttcacatctgctctgaaggtcaccatatccggaagccttccctggcctccttgtttaaaatggcacagcccccactccacgcctggcactctctgctgtccctgattcgttttctccatacagcttatctttgtctgatatgtgacatagttaacattttatatttgtctttctttcctagttagaatctgaactctagaagggcaagggcaaggatttataactcaaaggttccgggcttaggcctcttttatattcttgattttgaggttaattaagagctcaggcctagcgaggtggctcatgcctggaatcccagcactttgggaggcccaggcgggcagatcacttgaggtcaggagttccagacctgcctggccaacacagtgaaaaacctgtctctactaaaaatacaaaaattagccagttatgttggcaggcgcctataatcccagctactcaagaggctgaggcaggagaatcgcttgaacccaggaggcagaggctgcagtgagccaagatcgtgccactgcactccagcctgggcaacagagcgagactccatctcaaaaaaaaaaaaaaaattaagagctcaaagagtttgttttcataggcagcagaatgagaaaagtttacaaaatagtttaaatgacaataaagtcattatagattaacataaataaaataccttttatgaaaaaaataatcattttctgaaatcagacaaaacattgtgaatgagaaggtggcatggttttatttttttgcaagtctccgaagcctggctggatagaagagcctggcttctcagagctgcttcagtctgttgtgatatctattgtatgtcacgtagcctctggaaaactccacagttagtattgttgggaaaataactttgacctcaggatctcctgaaaacgtcttggggaaccccagggtctagaggctgcagtttgagaactgttgctgtggtatcccaggtgtctcaaatactgcctagaacataggtggtactcagtaattattgttgaaggatgaatgaatgaatgaatgaatgaatgaatgaaagaaagaaagaaatgtgtctttgaatccagccatgtgcccagaatgatgagacagatgacaaaagctaagggactttagcatgaggagagggggttcgtttccttttttttcttttttttttgagatggagtctcactctactgcccaggctagagtgcagtggtgcaatctcagctcactgcaatctctgcctcctgagttcaagcaattctcctgcctcagcctccagggtagctgggactacaggtgcgtgccaccatgcctagctaattttttacatttttggtagagatggggttttaccatgttggccgggctggtctggaactcctgacctcaagtgatccacctgcctcagcctcccaaagtgttaggattacaggtgtgagccaccatgtccggccaagagggtgttcatttctgctccttgccaggtattgtgtcaggcactggggacccagcagtggctgagacagacagggctctgcctcacggagcccacattttcaccaggcaaaggatggtcggcccctaagctgggagataagacttcagcagttgggtgggggagccgtgggagaagcccagcccacagggggacagtgcaaatctagaaccaaggcgatggcaggggtgaggctggcacggtagctagagaccacgtcgtgccaagggccttggggaccatgggactatgggaccttagggaaggcgtctggaatgctgtagccagacactgttgcaaggaggatttttctgtagacatgaggccttccttatgaagaaagcaagggttctttcattcctgggggtgccaggtgctgtggactgcagcacgcgtggttgctgccgtcacagagctgtcatgcaggagggcagcgcgtccttgggaaggtggcaggcaggtcaggctaggaggaaagaggccgggaagctgagggcatttcctgcccgagatgcccaatgtagcctacttctgtccccagtggcttaaggcagagttgcctggtaggtgccctggtcccaccctggtgaaaggctgaaggtatttaattagtgcctgagaagcagagaggaaacaggatgtgccaaaacactttgatggatggtagagttaacaggctccttgcctgcagctgcttcagacaagagcgtccccaagccctgggcctgacctggaatgtggggatggaaggggagggggaggaaccaaggcactgggagggtaagtctctctctcccacatagacacacccactccttatgggtgcctgggcatctcctggtacctagaatctggcctgtttatctccacacccatccctggggtctacactaggccctgtgggtggcagttcacatcaggggagttctgactttggctctgagaggtg[135 bp omitted]tggcgaaactccatctctactaaaaatgcaaaaattagccaggtgtggtggcaggtgcctataatcccagctacatgggaggctgaggcaggagaattgcttgaatctgggaggcgaagattgtagtgagccgagattagttcgcaccattgcatgccagcctgggcaacaagagtgaaactccgattcaaacaaaaaaaaaaaaaagctgggcatggtggagtgcctgtagtcctaactactcaggtgggaggattgcttgagtccaggaggttgaagttgcagtgggctataattacaccactgcactccagccagggccacagagtgagaccctgtctctaaagaaagaaaaaaaaaaacaacctcaggctccgagggcaccattactgctctatactgaagagctgtgcagcttttccagacccgaaatgtcatccacaaaacagaagtgataatggtcctgcctcacagacttcttgcagtagtccaggtgtttagaacggggtgtaaaaggccgtgtgcccttggtaggaatctttgcatatgcatttgatcatctgcagcctgcccagcccactgcttgccccctcctgggtgtgctgggaaggggtctttggccctccaggggttaggtgccccagcctccaaggtgccctcacgccttttcatcccgactcagatgctgacctgacctttgaccagacggcgtggggggacagtggtgtgtattactgctccgtggtctcagcccaggacctccaggggaacaatgaggcctacgcagagctcatcgtccttggtgagtgggcctgggaagggggaggcatggcccttccttttgtccgcttctgttctgtctgccctcccctgtgtccgccctctgccctccagcttaccctctgggctctgtcgcctgctctgctctcccccaggctctgccagtcacttaggctcccctgtgccctgcaccccaggcagggaccactggcccacagtgcctccaatcacccaagccaaactaagagaagagtggagacaattggagactctgccttttcaaagtctcatttttaaaaaaaatccagacttggggtccgggtgcggtagttcatgcctgtaatcccagcactttgggaggccgaggcgggtggatcacttgaggccaggagttcgagactagcctggccaacgtggcaaaatcccgtctctataaaaaatataaaagccaggcgtggtggtgcacatgcctgtaatcccagttactcagaaggctgaggcatgaggattgcttgaacctgggaggcagaggatgcagtaagccaagatcaagccactgcactccagcctgggcgacagagtgagactctgtccaaaaaaaaaaaaaatccagacgtggtcagagtccatgggcagtgaatgaggacagttgatggtgtgcaaaatcgacccacctcttgctacatccccaaggcctcatctcacccgagtccctcgccaaagcacagcggttttgccgtgtgccctgctgggatggcgctgcatggcacacacactgtgtaagtttgagtgcagctgaaacgaagccgattccagacacccaggggcagggcggggtgtccgtgtggctgggaggcctccttgtgttagggggatgttgccatcggccaggtgccctgctgtaagccaacacatggagtcttgtatgacatgtgctctgcatgagtgatgccgctgggctgtacactgccatcttcacatgtgtgaatgagcacgtgactggggggtacttgggctgcaagacagagttcatgtgtgggggatggaacacgtgcaccagtgacccaggaacctctgcctgttcttcggtaaaatgcaccatttgcatcagcagttcccaaaattagtctccaggtctatttacactctaaaacattatcgagggtctccaagagcttttgtttgtttctgtgggttttatgtctatctgttgcttaacatattaggaattaaaatggggagattttccttttttttttttttttttgagatggagtctcgttctgtcgcccaggctggagtgcagtggctcgatctcggctcactgcaagcttcacctcctgggttcacgccattctcctgcctcagcctcccaggtagctgggactacaggcacccgccaccacacccggctaattttttttgtatttttagtagagactgggtttcaccatgttagccaggatggtctcgatctcctgacctcgtgatccacccacctgggcctcccaaagtgctgggattacaggcatgagccactgcccggccttaaaatggggagatttttcaagcccaagatacacaaggaagactgggcaacatggcaagaccctgactctacaaaaaattttaaaattaaccaggcatggtggcatgcacctgtgagcccagcttcttgggaggctgaggcaggagtatcgcttgcacccaggaggtcaaggctgcagtgagccgtgactatgctactgcactctagcatgagtgacagagaccctggctcaagaaacacaaacacacacacacacacacacacgcatatagtccattaggcatcagggcgatgatggcatcagggagcctgggaaactctactggacattcatgggagaacaagtgaaaaaggcaaataacatcttagtgttattctaaaatttcttcttttggccttgtggacaggaccacgctttgagagctgtgactgacatgcctctgtcctgttgcgagggcctatagtgccaagtgcatgagctctggggagggcttcgtgggtgcagagctgggcctgtggaggcccctcagacacaacactggtggggctcagagctccaggggcactcgagggaagacaagaaccggctctgagatgcgtgaatgtgacagtgcatgagtagagatggagaccttgtgggtcccagaaccaggactgcatatgactttcatatgtgggtatttttgccttcatgggtcccttcctgttttaaaaaaaatgtgtgattatgttgtcacaaagagtttattcctgtatattgtgttaatttgtgttcagatttgtaaagtaaaattaaaccatttcagccaggtgtggtgacacatgcctgtagccctagctacttaccccagaggctgaggtgggaggatcgcctgagcccacgaggttgaagctgcagtgagccatgatcacacccctgcactccagactgggcgacagagctgagatcctatttcgtgggccctaggtccctgtgcctgctggaacaggacatccctatcaccgtggttggagccctttggggtgctaagacctatgaatgagggaaacttagggtgcccaagctgaggtagagccctcagaaccccctgggatttgtattggagccctcgtggcataacacaggtggattatgcaatgggagtttcttacctataagcacccacatgtgggcgggtggagggtaggagccatgcactagggcttcagcccccagccccttcccgcttcagggcacaccttgcacttggccagcctggagctgggctttcgggggtggcacagcctgggctggctctggccagcataatctgtttctcttttgtccctccagggaggacctcaggggtggctgagctcttacctggttttcaggcggggcccatagaaggtacggggggtggatcctgagttgggcttctcgggagctcccatacatcacctactgcttctgactctagttagtatccccttccccactaaaccctgctcactgtggacccctcactaacctggcctgactgtggctctgaggcatctagtggtctggcgctgggcctaggctaggctgggctgaggagagcctggggtgcaggccagggctctgtgactggcacctgcggtgctcttgagggtgtggcgtctgggcagctggctctctctttggtctgggggctgcagtctgtctccctctgtgcaggctgcctcgttttctgccttgtgttttttgcacctgggggagggccgtaactggggaatggccgggatggtagaatggggagtgtgctgtgcccagcctctggcacaaaaaatccagccagggctgcaggttccttggtgagctttgcaaatcgtccccgacctcagtgctggctccgcaccatgtacccctgctgtgccgttagccctgttccctcccaggcctccgggctcagggcctgttgtctttctgcagactggctcttcgtggttgtggtatgcctggctgccttcctcatcttcctcctcctgggcatctgctggtgccagtgctgcccgcacacttgctgctgctacgtcaggtgcccctgctgcccagacaagtgctgctgccccgaggcccgtaagtgtcccgctcatggccaccctggtttgggcaacatcctgcatccaagggaaggaggtggccatccacctgcccccaggacagtggcgttggtctggagggtgtgaatttagccagtggggagaaagtaggctgaggagggtctgctgtttagattgtcgtttacttcctccaacttttagtttatttttatttatgttgttcttttcttttgtaagtataatccatacacatggtaaaaatgtccaacagtacaagatactagtcacatggaagtaaagccctctaaaaaaaccaaatcttggctaggcgcagtgattacgcctgtaatcccagcactttgggaggccaagacgagtggatcacttgaggtcaggagttccagatcagcctggccaacatggtaaaacccagttctctactaaaaatacaaaaattagctgggcatggtggtgatcgcctgtaatcccagctactcaggagactgaggcatgagaatcgcttaaacccaagaagtggaggttgcagtgagctgagatcacgccactgcactccagcctgggcgacagagtgagactctgtctcaaaaaaaaaagaaaaaaaaatgttaagtgaaaaagttaagaaaccaaacaaggtttacaacactacatgatttaagcaaaaaaaattttttttgttttagagaaagggtctcattctgtcatccaggcagtgcagtgcgatcatagctctctgcagcctcaaactcccgggttcaagcagtcctcccgcctcagcctctggagcagctgggactgtaggcacacaccaccatgcccagctaattttttgatttttgttttttgtagagacggggtctcagtatgttgcccagcctgatctcaaactcctggcctcaggtgatcctcccaagtcagcctccccaaagtgctgggattacaggcatgtgccaccatgctggccaatttttaaaaattttctgtagagacagggtcttgctatgttgcccaggctggtcttgaactcttgacctcaagtgatcctgcctcaggctcccaaagtgatgggattacaggcatgaactaccacacctggccttaaacttaagcaaatttttttttttttttggagacagtttcactctgtcgcccaggctggagtaaagtggcgtgatctctgctcactgcaacctccgccccccgggtttaagctattctcctgcctcagcctcccgagtagctgggatataggcgcctgccaccacgcctgactaatttttgtatttttagtagagacggggttttgccatgttggccaggctggtctcgaactcctgacctcaggcagtccgctcccccgcacccctaccttggcctcccaaagtgttaggactacaggtgtgagccaccatgcctggccaaatttaagcaaatgtttgaaaacacatacccacaggaatgctgcacattttacccagctactatgtctagggtcgtatctagcacaccagcatggctactgtggagagctgggactggatgtgagatgagagctaaaggggaagtaagcaaaccaagcaggggaaggtaagagaagacagaagacagagagagagggacctaactctatgagaggagtcagacatgtgcaattgaaaaagacttgctcctgtctctcttctgtgaatgtttgtgaatatcccaacgggacactttcacagaggagctgattgacgtggtcacagccatcagccttgggacaccagaccacagtgtgtacactaagtggcactgatggacacttcagcatccctctagctgctgtcccgtttcccctcctcggggaccacagctgttgccagtccttggtttccttcaggagggtgtctgggtagaccagcctgtgtgcacacagtccaagatacatgaacagtgaagtgccaggcaatccttgcaagcatgggcaggtggagagctgaggcctgcttgacaccttcctgctcagaagcccagtgagcagtttccctccctagggctcagtgtcatcccctataaaatggggcttatggcagagctcaccacactgggtgcatctggggatttggcgagctcatgtgcacaccattgagcatggggcccaacctatataaaatattctacgtctgtcagctgctgggcactgccactatcagcctcagtagtgactgagggacagggcaccagtcagagccctggtgcacacagagtgaccccagagaagcagccttccctctctgagtcctgtttccttctgttaggtcctgacttcatgggttgttgttagcattaaggaagtcgctggctaattttatagtcattgaagtcagtggtgtgcaacctggttcctcaaaggatcacttccctgaaaaaattccactgctccctggaggcttatgcaggccatcccatcccctccctcttgttgtgttcagctgacagctttttgctcagtgagtaagtgttaggtccatttcacagatgggctgcaaccaagtttgcagtgaacccactaagaccagagctagggccaggactaaatgctggtcccaatgccacattcccctgtccccacaccacatttcctccatccggagaccctgttaccccaacccagggccccattaactccctggcagaggccctgttacatctgctgctgccacagcctccgcccacccttcaggaggcagcaggtcccactgctgatgataaagttgcaggctgcctgagctaatgaaggggcttcctctaggctgtgcacttagtcttctgcttccaaaccaaatcagaggtgaggcaccctctctgggcccatctctctcctccattttcctgttggggtcccagggaggaagccacttgcctagggcccaggaattttgcaagcctcttgccctagggaggaaggaagggaggaggatcttaccttgaactgtcaagcctagagcctggtggggcaggcagaaatgggtgcagtccatgagttagaaacactagaggagacactttgctgcttggccggggcaggcaagttaattcccgaggctcctgccactgcatctcaatctggaaggtgaccaggtgggcaggacccacgtctcccagatgactcattttttctagaacaggggcttggctgccaaagaggatacttgatttcggcttgtggggacagtggtggacccagcatctgggctttatataaagggcagctttgttgccctgtaaacacacagaccatgggtggccacttcttccagtaagttagctggggagttggaagtttaggtaaaaccttttgattgacaaatgttggcgaattaccatgctgttaaatgaaacattgttctgccaccctggggctgtgggtgcctgcgtgcaccctctgaaaaatcacacaggaagtggggtggggtctctgtgaagctggtgtcccccagcctcagggatgctgcagaaatggaatgaggaccaacagggactcagatgtccaaggaagctctacagcggagaggacggcttgggaaggaggtccaggcccaggtccctccggaacccaatgggtatggggcagcctggctcctgcctcatcccccttctcctgttgattgtgtcctcacagtgtatgccgccggcaaagcagccacctcaggtgttcccagcatttatgcccccagcacctatgcccacctgtctcccgccaagaccccacccccaccagctatgattcccatgggccctgcctacaacgggtaccctggaggataccctggagacgttgacaggagtagctcaggtgaggccgggggaagcaggaacagctggtgggagtgtgctgggcatctggacactgaggggcaggggctggaaggaagagtgtcttgggagccgaggaggggctctgctcctggtgcgcggccactgacagccactctcccccagctggtggccaaggctcctatgtacccctgcttcgggacacggacagcagtgtggcctctggtgagaatccatcgtcccgaagttggatgtgcctgtaagggagaggggtgggccaggatccatcctcccaaaccgaccaccacccccctgtccctagaagtccgcagtggctacaggattcaggccagccagcaggacgactccatgcgggtcctgtactacatggagaaggagctggccaacttcgacccttctcgacctggcccccccagtggccgtgtggagcggggtaagcaggagccttggggtctgagggcttttaaggtgggggggtgaaacatgtctccctgatacctgccgcagggactcttggtgcaaaccctggaccccgggctcctccagcagtcagtgacaccccccttccctgcagccatgagtgaagtcacctccctccacgaggacgactggcgatctcggccttcccggggccctgccctcaccccgatccgggatgaggagtggggtggccactccccccggagtcccaggggatgggaccaggagcccgccagggagcaggcaggcgggggctggcgggccaggcggccccgggcccgctccgtggacgccctggacgacctcaccccgccgagcaccgccgagtcagggagcaggtctcccacgagtaatggtgggagaagccgggcctacatgcccccgcggagccgcagccgggacgacctctatgaccaagacgactcgagggacttcccacgctcccgggacccccactacgacgacttcaggtctcgggagcgccctcctgccgaccccaggtcccaccaccaccgtacccgggaccctcgggacaacggctccaggtccggggacctcccctatgatgggcggctactggaggaggctgtgaggaagaaggggtcggaggagaggaggagaccccacaaggaggaggaggaagaggcctactacccgcccgcgccgcccccgtactcggagaccgactcgcaggcgtcccgagagcgcaggctcaagaaggtgagggccgccctccctggcgtccagaccgtccctgggcccccagccggtccccgcggctcatacccttctttctttctcccttgcagaacttggccctgagtcgggaaagtttagtcgtctgatctgacgttttctacgtagcttttgtatttttttttttaatttgaaggaacactgatgaagccctgccatacccctcccgagtctaataaaacgtataatcacaagctctggagagaaccatttgttcggccgcgcggggcgggggaccggggctgctcccgtatgcgtctgtaaagcgccgcgtcccgggggcaccggagtccggggccgggaggaagagacccagcctggcccggcccgcgcccgcgccgccggccggagaacgtgccccgcgcagccgccgcccgcctgcgtgcgcgccccggccccgcccaggcgtgcgcatgcgccccggccctccgccttcgcgcaccgcaggctggccgtccgggacgcgcgcgcgctcctctccccttccagcccatcccccccagccccccaccgacctactttactgtctccaaactcgggcagcccacctggcccccgacgaccccagcccctgcaccgggtaccccgacgttccatccagacccgcgtttcaccagggcggcgcgcggcgacctcgcgccccgcggagccccgggctcgcgcgcgcccgcccgcccccggagacagaccagcgcgcgcgccccgggccgcctccccccagcgcgcgtccgccccggggctcgcgccgccgccgccgccgccgccgcgcgcgcgcagctcaagtaaaggaggaaaaaaaaaagggggaaaaatagaaagcggcggcggctgcagcagcgatccgccgccggactgggccaagccgggcggcggccgcgcgagccggcgatccagggcactggcggcggccagccagggcgggccgtgttcaaaaaaaaaagtcgcggcggcggcggctgctcagggaaggaggcctgagggccgcgtgcagcgggcgggcagctgggtgggctgggggcggccgcgcggcgtcccggagcctcgggccgcccggagccggcgggcgggcggaggcggaggcggcggcggctgcagcggctgcaggagcggcggcggctgcggcggcggcggcggcatctcctcctcacatgaccccactgtttgtccccgtgatcagcgcgagcggctcccgtatctcctccgtcccctcctgccgcgcggcgtgagcgccgggctcggggcccccccggccgcccgccccctcccctccctccctcccctcccctcccctcccccccgggccccgcgccccccccgcccccgccccccccatggacatgctggacccgggtctggatcccgctgcctcggccaccgctgctgccgccgccaggtaagatccccggcccggccgtgcccccgcgccccggccccggccccggccccgcggcctgcaggccggggccgccatgatcccgagcggccgcgggcccggctcaaaatggaggccgccggcgcgggggggacctggcgcctcccgcccccggcccccggcctcggcggcgcccccggcctcaggcgcggccgggtgggactggggccctgcagctgggcgcgggggcgggggcgcgggcgcgggccgcgctgaccctgctccctcctgtgcccctggcagccacgacaagggacccgaggcggaggagggcgtcgagctgcaggaaggtgagtgcttgccgggccggccgcgcccggggagggctgggggcgctcggcgcggccctgaccgtgccccgaccctcctcggccccaggcggggacggcccaggagcggaggagcagacagcggtggccatcaccagcgtccagcaggcggcgttcggcgaccacaacatccagtaccagttccgcacagagacaaatggaggacaggtgagcggcgggccgcgagggcgaacgggcgggcgggcgggcgcgccgggaaggctcggacctggccccagcgccggcctcgccgctctgccgccccctgcaggtgacataccgcgtagtccaggtgactgatggtcagctggacggccagggcgacacagctggcgccgtcagcgtcgtgtccaccgctgccttcgcgggggggcagcaggctgtgacccaggtgggtgtggacggggcagcccagcgcccgggccccgccgctgcctctgtgcccccaggtcctgcagcgcccttcccgctggtaggtgccctgccacccctgggtgggggggggagggagtggagaggggacactggctctgctcttggggagccccgggggtggggcaggtgtcgcccagcggatgctgccttcaggcctcaggctgcatggggccagatccctgttgtgcaccgtgaaacctggggacagtgctcttggaatttttttttcccgcaaaatgggaatgatgtgtcttaagaggaaagtttcttagagtgcgaaacggatttgctcagcaagtgatcgctgacctcccgccatgttccagggctgtttgaaacacaggacagaatgctacacgcagaaggagtccccactcctgttaattgcagagaatgcagtaaaccccaagcacagcaatgaggggacgggatggaggaacagagaaagctaagggtagcctctgccctcctactccccaggctgtgatccaaaatcccttcagcaatggtggcagtccggcggccgaggctgtcagcggggaggcacgatttgcctatttcccagcgtccagtgtgggagatactacggctgtgtccgtacagaccacagaccagagcttgcaggctggaggtgaggagtagaagtcagattggcaggtgggggaggcaacgggcccagcagggagggaagcccccccagccagttctgacttcaccctgccttgccactaaccccccactctccctgcaggccagttctacgtcatgatgacgccccaggatgtgcttcagacaggaacacagaggacgatcgccccccggacacacccttactctccgtatgtgcaggggacacctggagggcctggtgttgaaatggaaggaagaggggtttctggagtagaagctgggcagttagcatgaagtgggcacatggtgtaatgttttttttctttgcctgtttctgctgctctagtgcacataaagtatcatgtcttttgtttttgcagatggatttaccttgcaaagataattttcaaatctaatacttagcagatgcttgggcaaacagctctgcgataatacatgccccctttttttttcctcctcttgtagaaaaattgatggaaccagaacaccccgagatgagaggagaagagcccagcacaacgaaggtgaggacaaggtgtggctccgggtccccctgaccaccaccctcacaggctcagccagccctggagtgtggagtgacagagagagaagccactcctgggcaggccacaagtgctccagagggctttgctggacgctgtaaaggtagaaagtgagcaacgaggggagagtacagtgtcagaagtagagggacagggagtgtgaattggaactggccatttgttgacccggctggtgatcttgaattcatggcccacatctaagatggtggacttcacactcccatacggattgcctgccccacttgaaaaatggggctgaccgggctcacgtgggctgacctttccacgtggcagctgtcatgctcacatcccgcactcccatgcctgcctggcctccagaagtaggtctgttcccccagggagcacatctgagggagaaactgcatgaagttctgcctctggctacctaaggccggagcatcctgccctttccagaaacaccaggtctcacctcaggtcatttggccttcagcactgtcccgccccgcctgtcagtagccactgcagtgggcacagcactgtgcaagtgccaggagagtgcttacacccaaacaaccatcattcaacaaatatttactgcccgtgggttctgggctgagcggcacaggccctgtgccaggtctggagtctggcctggagcgtcagggaggctcaaaggcctgagggcttatgtctcatgggtctcatgggacattgatggggggtgggctggggtgacgcttccctagggagaggggagtgtgggtcaggttactttgtggggtgctggtttggttgtgggagaagttccatttagaatgcctcaggagggaagatcgggaaggcctcgaatgcccgagtgaggggctgaatgctgagtcctaaaggtggtgatgggactggggtctgtggcccaggtagttgtgttctgagcagctcctccctgagttcaggcgttcattcagcgcgtgcatactacgaccagccccccttttgcgtcctcagatatggcaatgcagcagatgataggacagacaaggtctcagctctctgtgcgcgttctggtgggagagatgggagtcacacagccgcatcaggcagtgcaggcagtcacaggcaggagaggaaagctggggaagaaggtggcgggtgatggcggcatggtagtgtgctctgaagggctcttcgagaggtgacattgaagcagatccctgaagcgacctgagggaaggggcctgttgagaacctcaggagagtcccgggcagagggaagagctagaacacaggccaggccctgagccagggccgccatggtgtgtctgcagaagagcagaattcaggaaaggaaagaggaagttggcgcagtggagggggctgcccaggccagatggtggaggaccttggaagaagtccccagtgtggctgtctgggctcctgtggttttattccagggtgatgagaagccagcagaggggtttgggttgtggaggctgttggcaagagtggtgggaaggggctgggaggtaggagaccatacgactgtcaggcctgagacagggcaggggttgggggaaatgtggggaggactccaaggctggagaataagggtttcgtgctgaactcccctccatgcttggaagggaaggggtgcatctgagcttggttttgagatgcagtgagtttgaggggcccccagagcagccccagccccacgacttacctgtggtggggcgtcagggtggttcttaatctccgtacctgtcttccctctgtgaaatggtggaagcacagccgccccgggcacctggtggggatgcagtgagtcttggtggccacacagtaaggcgaagagaggactcagaaccctcccaccccactctcacccccgcctctcccttagttaatctgactccaggcagccttgaaactttctcaccctgtgaagcagtcttcatcacctgcccacttctccagctccgtcctgtctccgctttcctgacttgcagagcatctgccccaatctgctcatcctcccagtaccctcagccatctggctcatggctctaccaaaacagctccacttccggtcacccgtggtgaccccattgccacatccactggcctcctttgctgtctgggctccaagcatctgatgctgcctgtttccctctgttcctttctggaatcttcctttctcctccatcctctctgattctcctgtgatctttgcctttcctaccccactgttaacagtgaaatttccagggctgtcccagttccaagtgagtagatgggggtgccggggaatctgtgttttccatcagctcttcaggtgatttgtcatagtggacaagcttgagaaactgctttggctgcgagtgtttctttttttttgagaagggggtctcactctgtcacccaggctggagtacagtggcacaatcacagctcactgcagccttgacctcccaggctcaagcgatcctcacacctcaggcttctgagtggctgggaccacaggcaggcgtcatcacatggggtaatttttttttatctgtagagtggaggtcttgctatgctgcccaggctcgtcttgaacttctggcctcaggcagtcctccggcctcggctacaggcctgagctgccacacccagtcttgctggtgtttcataaggtccggcccctcccgtcggcctcaggtgtatgacttgtgaggcccagcgatgggctcggaagctcttggtcagtatcccccaaactctgttcccccttgtaggtgttcctcttttttctttgctgcagaagagtgtgtgactcacaaaaagttgaggactgttccttgatgtcctcccaggcttcgcccaccacctggctcctggtaatgcaaggaactgtgtttccatccattcccttcctttcactgcaactccagccccacgttttgaactacctattcgagatttctgtctctggacatccctgtaatgcctcaaactcaactcgcccaaaagagaatgtgccatctcccgtctccaaaggctttcatgcaaccttcttctttgcagagcagcaaaagctacccctgtcacagctgcccaagccagaaactaagaccagagccgctttcaactctgccctcttcttcccttatggccacaaaccccaagtttctcttctgtggtgatttcagatccgcttctctcacttctttttccctccttcccaccacttcttggtactgcaggagcttatcccagagtcacagactcaaatgcctgcaggggcctgagggagggaggtgcacttggcatctcaggaaggggtgtgtggctgggtgtggtggctcccgcccggaatcccagcacttttgggattacattttggccaagacggacggatcacttgagcccaggagtttgagaccatcctaggcaatgtgacaaaaccctgtctctaccaaaaaaattaaaaattagccaggcctggtggtacatgcctgtaacagtcccagctacttgggaacctgtggtgggaagatggcttgagtccgggagacagaggttgcagtgagctgagattaccctccagcctgagcaacagacccagaccttgtgtcagaaaaagataggaaaggttgtggggggcccccagtgatctggggcatgtgtgcgctgcctgaagggtggcccttgcccagtgccttccccttgctgccctgtcagaatctagggccactgttgccagaaactctgagaagctagaaatcgagacttatgtgaaatctgatttttaggtgccagattagattgctttttccgtttcattgatttctactcttaatgttactaattcatgcttctactcacttggttttttgtttgtttgttgttttgttttgagatggaatctcgctctgtcacagtggcgcaatctcagcttactacaacctctgcctccccggttcaagtgattctcctgcctcagtctcccaagtagctgggactacaggtgcccgctgccacacctagctagtttttgtatttttggtagagacggggtttcaccatgttggccaggctggtctcgaactcctggcctcaggttatccacctgcctcagcctcccaaagtgctgggattacaggagtgagccactgcacccggccccttctactcactttggattcaatttgctaggtttcatgctttagcttccctggcacaccccaaccccagctttttaaggtaattctttttttttttttttttccaattttctactaaaatctttattttacaggattaatgtttcacagcagggattgagatgattcttaacctttctctttgcttaacaacatttagagttgccagttcactccagcatcactttagctacatcccactgggatatgttgtttttgttatcattcagtttaaagtgttttccaattttccttgtgatttcttctttgacctttctgttatttggaggcaggttgcttaatttccaaatatttgtgggtttttcagatatctttttgttattgatttttaatttagttctgttatggtcagagaacatactctgtatgatttcagttccttgaaattcgatgagacttacccgacgggcccgaatgtgtcctagcttggcggaagcttctggggcattgacgaggacaggtgtctgctgctgtcaggcagaatgtccccccaggtcagtgaggtcaggctggttgagtgttcaggctttctattctgatttttgttgttgttgtttacttgttccaccaatcaatgagaaagatgtccatgtctctcactatatttgtggatttgtccatttcttccttcagtcctggcaggtttcgcttctgaattttctcttttttttttttttttttttgagacagagtctcgctctgtcacccaagctggtgtgcaatgatgtggtctcggctcactacaacctccacctcttgggttcaagcaattctcgtgcttcagcctcccaagtcgctgggattataggcatgcactgctatgcctggctaatttttgcatttttagtagagccggggtt[136 bp omitted]tgtggaatgaacgtggccttggtcctaatgggtcttcctgtatttcaaatgtgccatgatggtcttccgaagccacaggctggacagcattaccgcctgctaatgtcagggcctggattcaagggcctgggactctggaggaggaggagatgcggtcctgacctgcgagcagagcacacaaggccttgacaaccgatctttacaaccttttcccacccctgcataccctgaaatggttttcaggccaccatttctgggatcttcccagctgcctgccttagagtctttctctcagaaaccagcccgaatgtttcctggatctctgaggattcatcccacccccattcccatgcagaggccatggctcggcgcctggcgttcccgaggcactttgtaccatcttcagtgatgacacgaatgcaatggggttagtgccacttgcccacagtggtgctgcgagtgcccatggggcgcaccggggctgcttccaccctggaccccagcctggcggagggcctggcacatagtagggcggggagtaggtgtgtaagaagtaagcttgctctggagaggatgtacctgcagccggcgcccagctctcgagaggactgtgggagggcagaggctgaaacgaggccgcctgccgagttcctccacagacccctgggcgaggagcgctctgctggggactgcgccagcggtgcctccaggcctggactctcagctccgctgctgcttttggccagagttcccaaaggcgggtgtggttgtctttggtgggaaggttcagcgcaccgcgatagtaataggggagcaagcactcgctgagcccagtgcagggcctggaccgtgctccatagcaagcactgatcttgggctattggttttggaggaaagagggagcacaaggatggaaggggccagggaagagaggtcacggtgggagaaggagagtccgcatccatcggagggtttgtcactcaggcctgagtgggaggcactggaggcagggagaggccagtcagcagcatgcggccacagcccagagaagccagaggggtttgctggtgggtgggccccagccttttcaagggaacggcaggtctggggagctgccgatctcggggtgtgagggtaacgggcaggctgtggcccacccctccttctcaggctcactggacccctgaccggtttcatcaccattatccaaggctttgaaaagaccccctggccttcctgccacatgtgccctagctatagggcttcgttcccctccacaaatggtgcagacagcatgagccaccctggcagggggctgggggtccgtggggtaggagttgggggtagctgagcgttctttcctgtccccacggtgcctggtgctggggcttggcagccagggttgggacagcctggctttagcaggtcctgagtcaggggtctcaggctccgcagcacacagtccccaggcaggtgtcaggatgggatgtggccagagaaaggcatgtgctctgtctggggatagctgccacccagctgacacagttggcatgagattgtggagttttatggagtaaaatcacaaatctgggttttttaagtaaaaccttctatgagttgccatctctggccttcaacataggatttgggtctttcctgggtgagctggtgctttgtgggccaggccctgggagctgcaagtaccagttgggatctgccattgccctgtggaaggattttaagcaggggtgaaacatggtcagacttggatttagagatgaggaaaaaaaacaaaatcacggtgccagagtctctggggagactggagaatgcagtgcaggggccgcaggagccaaaaaggggcactggtcctgcgaagagtggctctgtccatccctgccttccagtatgtgcccactgtgaccagagctccatttctcaaaagaagccagtgatgccaattaccatgagaaatttccttatttttaactgtcgattaaaatttgtacaagtatggtggggcaggcctgcaaaatgatctccaagtgcctggcctttgatgcccgtcctaaaagcatgtgtggcactggagggcccacgtttctttgttcctcttgagaagctggggtgggggccggctgggctcagggtgcggcccctcacttcccagggctgtggtctcggtggggcctgcactgttcctgggtgtccttgggctgagcctctgccctgtgaggacggccgctcaggcatgatccgtcagcgaagccgtggctgtgactctgttttccgcagtggagcggaggcggagggacaagatcaacaactggatcgtccagctttcgaaaatcattccagactgtaacgcagacaacagcaagacgggagcggtgagcaccccggaccctcagtgtctgcggtggtcccggcccccgacccttgcatgcagaaagtccaacagccatggggctcgggagtcatccctggggtggaggccggtgggcggtgcctgccctaaggctcctggtcccctcgccccccagagtaaaggagggatcctgtccaaggcctgcgattacatccgggagttgcgccagaccaaccagcgcatgcaggagaccttcaaagaggccgagcggctgcagatggacaacgagctcctgaggcagcaggtgggtgcggggcctggagcgggtcagggcccaggagccccagatgcaaggcgctggccctcagctcccttgacctccgtcgtgtccgccagatcgaggagctgaagaatgagaacgccctgcttcgagcccagctgcagcagcacaacctggagatggtgggcgagggcacccggcagtgacgcccgccaccaccacgcagccgccgccgcccacgccggcctctgctgcccccttccccagcccttagcacagagagggacacatgcccctcccccagctgcgtttttttatagtagatttttaacaaaaaacggggagaaataatgcatttctgtggatacagtgcccaccgccctcctccacttggaaacggtatcctccctgcccatccgtctgtctgtcgcccttctcccggccctcactaagccccggcacttctagtggtctcacctggaggcaagagggaggggacagaggccctgccacgtcccgctgcctcctgctctctggaggtactgagacagggtgctgatgggaaggaggggagcctttggggggccacccggggcctggacctatgcagggaggccacgtcccaccccacctcttgtttctgggtccctgctcccctttgggggtgtgtgtgtgtgttttaattttctttatggaaaaattgacaaaaaaaaaatagagagagaggtatttaactgcaataaactggccccatgtggcccccgccttgtctgcttgtgtgtttgtccatctcaggagtggggagggggcctggggtctgcagagctccacgaggcatggttctgctgttgtgcacatggctgtgcatggtccctgccagctgcaccacccattacccagtggttggttggatggatggaggaattaaggaatgaatgtcccctttgaggccctagacgtgcatgagggtgtggggagctggggtcaaggacatgtcccatgttggaggagaggcaggggtctccgtgtcaacagttcctgaaaacacaaccagcccctggccctgccctgctgggccaaagccctcccctctgcaccagccaatagtggggcctggccttgagcccctcacccccagggagggcagatggccagggcgccaagcttggcccgtcagcctgtcgccttgcaccaaggctctggcgcctgtgctgtgacccctgcccctgctgatgatgaaacctgtcctcagctgagatgcagcgatgcctggtagggctgggggctgctcctgtgtctccccaggtgagcacacccctattcactgggccctgcttcagcctgcagcacccttcaactcccaggagctgggcttgccactctgctcaccttgtggagctccatctgcctttcctccccaattcccccactccctgcactcgtctcttcccacaagagccctgtctccttttcctagctattcccatctgaggccatctttattcatttagtttttagagacagggtttcactctcacccaggctggggtgcagtggcacacaatcacggctcactgcagccttgaccaactacaggtgcgtagcaccacagccaagtttttgtatagatggggtctcgctttgttacccaggctgtgacaagaggagcctcccacgtggtgtggatgaggaggcagatggcagggcctgtgcatttctgtgcttgagtgggccttgaaagtggttcagcaaccaggaagaagtgttcattcctcgacaacaacatccccgggctctggtgacttggctgacactggatggccctggaatgaaaaaggcaaagaggcaaaatgtgcaagggcccatctggaaccaaggtttgttgatcccctgggccgtgtgcaccctgagctgggcctggtagtggaaaggaatgaaggcactgcagtcaggcagcctgggttcatcccccagctagtggtgtcctaaggaaccggctccccaaaaacatccctggcttgtagtgcttgccaatttctgggtgtcaagactcccactgctgctgatttcaggataccagcatgatgccactgaatgcagagtttcgagatgtgcatggtctgctatgttgagccaggtctagcataccgctgtgccctgctgtgttttaggggagatggggaaacctggtgggtaagagcaaaagccctggagtcaggctgtccaggctagaatctcagctctgcctctggctgagcaagcttgggccatgccctgatctctgccttcagtgccttttctgtaaagtgaaggaaatgagtgtccgacggggaggaggttcctaaaagggagcagggtctggggagcccaggcctctggggttgggtgactgagaaggcagcccctgaatacagagcagagctgaaggtggggcagtaagtgctgctgggagaacaggcagcacaggctgagttggtgcagaagtgagtcaacatatgtgccatcgtataaaatgtactcatcggactgtagatgttagctattactattactgctattttatgttttatagacagggtctcactctgtcacccaggctggagtgcagtcacacaatcatagctcactgcaacctcagcctcctgggcttaagcgatctgcctcagcctcccaagtagctgggactacagatgtgtgccaccacgcctggctaaatttgtttaaaattttttttgtagagatggggtctccctatgttgcccaggctagtcttgaacttctgggctcaagcgaccctcctgccttggcctcccaaattgctgggattacaggcataagccactgtgctgggccatattactgctgtcatttatggccaaaagtttgctcaaacattttccagttaccagagccacatctcaagggtctgacactgggaaaacaccacgtgcggatcgggcacacgctgatgcttgccctgctcagggctatctagtgttccctgccagaacctatgcacgtgtggtgagagcttaaagcaatggatgcttcccccaacatgccagacactcctgaggagcctggcggctgctggccatgccccgtgtgcatgtaggcgatggggaagtgagtggaggagagcggaaccttgattctgctcatcaaactgcttaaccgctgaagcaaaagggggaacttttttcccgatcagcagaatgacatcgtgatggggaaagggctccccagatggctggtgagcagtgtgtgtctgtgaccccgtctgccccaccccctgaacacacctctgccggctgagggtgacacaaccctgttccctgtcgctctgttcccgcttatctctcccgccttttcggcgccaccaccttcttggaaatgagacagagcaaaggggagggggctcagaccaccgcctcccctggcaggccccataaaagcgactgtcactcggtcccagacaccagagcaagctcaagacccagcagtgggacagccagacagacggcacgatggcactgagctcccagatctgggccgcttgcctcctgctcctcctcctcctcgccagcctgaccagtggctctgttttcccacaacaggtgagagcccagtggcctgggtccttagcagggcagcagggatgggagagccaggcctcagcctagggcactggagacacccgagcactgagcagagctcaggacgtctcaggagtactggcagctgaacaggaaccaggacaggcacggtggctcatgcctgtaatcccagcactttgggaggttgaggcaggcagcccacttgaggtcagtttgagaccagcctggccaacatggtaaaaccccgtctctactaaaaatacaaaagttagccaggcttggtggcaggtgcctgtaatcccagctactcgggagactgaggcaggagaattgcttgaacccgcaaggtggaggttgcacagtgagctgagattgcaccactgcactccagcctggcaacagagcaagactccatctccaaaaaagaacagaaatcaatgaagcaccgagtgacagggactggaaggtcctaattccatgggtatttacggaacccctacgccgtgtggagtcttattctagacagtggggacgaggccatgaacaaggtagatgagagaggagatttctccatcctggtcagggaatttgttaaagactgatgaaaacatgaataaataattgtgtctagtacattctattcgtgaatctcataacagacagtggtagagtgaccgtgacccattcgccacacagtagagtcacttttttggtttgttttttagagacagggtcttcctctgttgctgaggctggagtgcagtggtgcagtcatagttcactgcagcctcaacctcctgtgctcaagcaatcctcccacctcagcgtcccaagtagctgggacagcaggcacatgccacgggttgggggaccacaggcatggtcaaggggctggcagtcaagcaagtgtttcatgagaaagtgacagttgaccttcgtcttggagggtgagagatggaggcagcaaagacctaaggagaggacaagccagcatagcccagggtcaggctgaacaagaggagatggtgggacttggggataaggctgaggggtgggcagtccctaagtcttgtgggcaaccatgcagacactgatttttccttggaataaagaggaagcccccataagcttttttttttttttctgagatagggtctcgctctgtcgttcaggctggtgtgcagtggcatcatctgggctcactgcaacctccgcctcccgggttcaagcaattctcctgcctcagcttcccgagcagctgggattacaggcggctgccaccacgcccggctaatttttgtttttttagtagagacagggtttcaccatgttg[133 bp omitted]tggccatgttttaaaaaacttaatctgccagtcaggcaccatggctcacacctgtaatcccagagttttgggaggccaaggtaggaagatcagttgagcccaggagttcaagaccagcttgggcaacacaaccagaccccacctctacaaaaaattaaaaaattagccgggtgtggtggcgtgcacctgctgtcccagctactcgggaagctgaggcgggagcatcgcttgagcacaggaggtcaaggctgcagggagctatgactgtgccactgcactctggcctgggcaacagaggaagactctgtctaaaaaacaaacaaaaaaagtgactctgctgtgtggcaaatggattgaggggcaagaatgcagggaggtgtgttaggaggctggcactggcatccaggcaggggaaggtgatatcccaaagaagagtagcagctgtggaaagaggaggaggcggatctgggaggtttttttttttaggaaaagccgcccatgggaaggtgagcagaagcaagaaagcaaggcccctcctaagagtccatttgagctctgggtttaaaccacttggagaggagcaggttgccgggagccagtctcagaggtccactgggccccctgccatcctctgcacccccttctgctttcacagacgggacaacttgcagagctgcaaccccaggacagagctggagccagggccagctggatggtgagcgcaacagtgatgcctttcctagccccctgctccctccccatgctaaggccggttccctgctcacattcccttccttcccacagcccatgttccagaggcgaaggaggcgagacacccacttccccatctgcattttctgctgcggctgctgtcatcgatcaaagtgtgggatgtgctgcaagacgtagaacctacctgccctgcccccgtcccctcccttccttatttattcctgctgccccagaacataggtcttggaataaaatggctggttcttttgttttccaaaccagagtgtctgttgtcctttctctctgccgagtgtctgtgctaagagcttgtcctgaccctgccttgcaagcaccagtgcttggtgggtcatgtggggctggtgtgtcctggaggttgccaggaaagttggtgaagaaaatttgtttctgttctcccccttcatgttgcaataataggggatgaaagttaatgtttcctctccttgagatcttcctaaaacagctgtagaaatcagtgcctgtaaggcaagcttgtccaacctggaggccacatgcagccctggatggctttgaatgcacccaacacaaatttgtagtttcttaaggcattatgagatttttccgcaatttttttttttctcatcagctgtcattagtgttagtgtgttttatgtgtggcccaagacaattcttccagtgtggcccagggaagccaaaacattggacactgctataaaggttctcaaagtaagatccagggactccttttgtagggctcctgaaggtggaaactactaagactttttttttcctttttttttccttttttttctttcttttttttttttttttgaggcagagtctctctgtgtcacccaggctggagggcagtggcatgatcttggctcactgcaacctccacctcccaggttcaagcgattcccctgcctcagcctcctgaatagctgggactacaggcacgtgccaccacacctggctaatttttgtatttttagtagaggtggggttttgccatgttgtccaggctggtctcgaactcctgacctcaagtgatccacccgtctcagtctcccaaagtgctgagattacaggtgtgagccaccacgcccggcctacaaagatgtttatttgcctttttcaccctggttctctcatgagtatacaatggagtttccaggaggctctgcgacacctgttggcatcatcaccagatggctaatggattgtgtgctggtgtatctcacgcttttaaatgtcccagtttctagcccggtgcagttgcaccatccctgctactcgggaggctgaggcaggaggataatttaagactgggagttccagaagaagacctggtgtcaaaaaaaaaaaaaatggggcaacgaaaatgagagcaatacagctttcaagaatgggaggggccaggggtggtgattcatgcctacagcactttgggtggctgaggcaggcagatcacttgaggtcaggagttcaagaccagcctggccaacatggtgaaacaccgtctctacaaaaattagccaggcatggtggcatgtgcctgtaatcccagctagtcaggaggctgagtcaggagaatcacttgaaccctggaggtggaggttacagtgagccaagacaacactgctgcactccagcctgggcgacggagtgagaccctgtctccagaaaaaaaaaaaaagaagaatgggcaggaactcagttccttgtggaggtgaactatattcctatatgtttcacgtgcaaagtgtgtccttcctgagagaatacaacttaagatgctcctgtgtaacaatcccccatacctcgctcatctgctatacctggatggcctctgaaggccatgggcctcacaccttttggtcttaggacccctttacattctgagaaattattgaggactccaaaaagctcttgataaagtgggctatatctctagttgcctgatgtattagaaactgaaactgggaaaatatttttactgtttatttatttatttttgagacagggtctcactctgtcgcccaggctggagtgcagtggcgcgatctcagctcactgcaaactccacctcccagtttcaagcggttctcctgccttggcctcctgagtagctggaactacaggcgcccgccaccatgcctggctaattttcatatttttagtagagacagggtttcaccgtgttggccaagctggtcttaaacgcctaacctcaagtgatccacccgcctcagccactcaaaatgctgtgattacaggtgggcctggcctgcccacatttgatagaaacagacataggggctgttatttcactgtcttcttagctcccaggaagcaacagctctcacttgatggtaaagggcattggtcattcggcctcaatgttgggtgtgggcagggagtgggaaggcccaggctgggcgggagagggctccaagacacggctgccacacccaaggcaggtaaacctgactagaacttctgattttgtcaagagaaggtgggaattcctatttttattagagatttcttgctttgacagtattggcaactgagcaaagcaatttgtcttttaacatcaacattctgtgagccaaacgaagcccagctgggcgccagatcagtctggggcaccatcaatgtctgccttcgctttggaatccacagaggcttgtcctctgggaggggaggtttcctgaatgaaaactgaagggatagggagaggggagttgtggtgagcttggcctcttattagctgtaacatcttgcatgcatcttcttcatatccggagctccacctcctcatctgtattttttattttatttttttagtctgggtcttgctccatagcccaggctgaagtgcagtggtgtgatcatggctcactgcagtcttgatctcccgggctcaagcgatcctcccacctctgcctcctgagtagctgggaccgcaggtgcctatcaccacgccccgctaaagttttgtattttgtgtagagacgtggatctggctgtgttgcccaggcgggtctcaaactcatggcttcaaatgatcctcccacttcagcctcccaaaatgctgggactacagttgtgagccaccatgcctggcctctccttacctttaaaagaacagaggcactgggcgtggtggctcacgctgtaatcccagcactttgggaggccaaggcgggtggatcacctgaggtcaggagtttgagaccagcctgaccaacatggtgaaaccccgtctctactgaaaatacaaaaattagccaggcgtgttggcgcacacctataatctcagctactctggaggctgaggcaggagaatcgcttgaacccaggaagcagaggttgcagtgaaccaagatcatgccactgcactccagcctgggtgacagaacaagactccatctcaaaaaaaaaaaaaaaaaacaaaaaaggaacagaagctaagtccatacaggacttagcttaactggctctagagctgctcaaccaagggaatgagtgtgaaattgctttggaaactgtccaatgcttcctcaatgtaaaggattcatattgacaggagagggtagaggcctccctcctggcaggtgggaaacctgaaatcaggaattacacttaatgacacggggtgctcttctctcctgagcaagcagttctctggggtggtcctagagagatgggagaacatgtaaagcagagatactcaaatttcagcgtgctcaaaatctcctggagggcctgcaaaaatgcagatgggtccaggctcagtggctcaagcctgtaatcccagcactttaggaagctgaggctggaggatcacttgaagccaggagttcgagaccagcctggccaacatggtgaaagcccgtctctactaaaaatacaaaaattagctgggtgtggtggtgcacacgtgtagtcccagctactcgggaggttgaggcacgagaattgcttgaacctgggaggcagaagctgaggtgagctgagaccttgccactgcactctagcctgggtgacagaatgagactctgtctcaaaaaaaattaaataaataaaaataaaatgcagatgaggctgggcgtggtggagcatgcctataatcccagtggtttacgaggctgagacgggaggattacttgaggccaggaattcaaggctgcagtgacctatgatggcaccactgcactgcagcctgggtgacacagtgagacgatgtctgtaaaacaaataaacaaataaactgcagatagctgggcctccagaatttctgattccacaggtgcaaggcggggcccttgaccttgcattttgagcaagctgcagtcctgtggaggactggttgtgaagctgacaccattgtctgagggcagcaaaggctcttggatggattgagcctcagctcccatctatgagagctttaagctttaagtgagagctccccatggccgagagcttcattctgaattcctgctgctaggaattcaaaactcacattgaagtcctaacgcctagtagctcagaatgtgaccttagttggaggcagggtcttcacagaggtaatcaagttaaaatgagacgggagaatcctaatccaatataactggtttcctaaatctgacagggtacagtgactcacacctgtaatcccagcagtttgggaggccaacacaggaggactgcttgagatcaggaattcaagaccagcctgggcaatatagtgagaccctgtctctagcaaaaaaaaaaaaaaaaaaaaaagtgccagtagtcccagttactattgagaggctgaagcaagagagtcgcttgaatctggagggtggaggtggcagtaaggtatgattgcaccactgcattccagcctaaatgacaaagcaatactatgtctcaaacataaataaataaataaataaataaataaataaataaataaacggcaaatctgggcaggggtgaatacagggggaagggaatgtgaagatgaagatgccatacagagaaaggcccggaacagatcctcacacccctcagaaggaaccaacactgccagcacttgatcttgttgatcttggaattcaagctcaattctggcagggttttttgtttgtttgtttgtttgtttgtttgagtcggagtcttgctctgttgcccagcctggagtgcagtggcgcaatctccgctcactgccagccccgcctcccgggttcacgccattctcctgcctcagcctcctgagtagctgggactacaggcgcctgccaccatgcccggctaattttttgtatttttagtagagacagggtttcaccgtgttagccatgatggtctcgatctcctgacctcgtgatctgcccgccttggcctcccaaagcactgggagtacaggtgtgagccaccgtgcatggcctcaattccggtttttaagccacccagtttgtgaaactttgttgtaacagccctggaaaactgatacacctgctctctcgtaaaagatcagctgatacggcagcaccggccactggatctgcgggtcagttgtccccttagacagggcacctgcccgccagtcacaggtcctgtcacccagccccttcctctcatgggctccagccgcctcgctcccacaggtctcctggagacccgagttgctgatgtcagcgactattgcgagtgctcctgtgggacactgtcctctccccagcaacagccttcagttcacacccagggaggagatggagccccacactgcaccagcacacgactccagctccaactaggtgggtgttgatgctgaaggctgtgacatgcaaataccccccaggatctccttgtcaccccgaccaccaccaccaaagcccaggcaccaggcccctctcttctccaggacccaggcattcaagccccgcccgactctcaatggtcctttgtcccggactgggaaaggcacgggcagagtctgacatcatgaagcctggggtgggggtgggactccccctccccctccaactcccccccagccccacaacgcttctctccctggtctgagggatttccccgcccctcaccccctgggttctcccttgagagcgaggaccccccctccccactgctctggcctgaaggaggacaggagatgtcccagtgaggctgaacagctcatggtgaaatcactgctgcactttgtcacgccacctccagctgccccgagcccccacccaccttgcaaaagtcatgaccaaggggtggaatctgcactcagagggtccttgcccaacttggtcagcacagtcctatgtgcaccaagcactgccccggggacagaagggtgcacatgacagacagagaggcagataggtttctggtgagcccctgcctctgagagctcctgggttagtgggaggcagaggcgggcagacctagggtgcacacgggccagcctgccaaggctacagaaggaaaggacagcattgcaatggaggggcctggctgatgggcgaagatgggaaagcttcccagggaagcggcacccaggctgctgagcctacaggatgggtgaacggcagccagtgccagagtggggagtgctatggggtggggactgctttccaggaagaatgagcagcaggtgcacaggccttgagtctgaaggtgccctggggctctggggaacacattcaaccacccacactgtttattaagctcaactgcctgccaggagcttgtctacgagcaaggatggattgagaatatccaagacgaagcttctggcctggtggaggtcacgttctcatgaaaggagttggtgaacacggaaggtcatttcagatggcaagaggaggtgacactgacgttgagggtggaaaggacctgtctcctcctgctgcccacctaatgttgccaccaagattccctgaggacaatgcctctgtccctcagcctgggacttccaaagagattagactgcccccccacccccgggacccagaatcagggtgtacagggatggaagatggggagagagcaaggcagccactcccgacccctccaggaaagagctaggagaacccaggcgtcaggctgcccagtccgagccccgtggtgacaagggcccctttgtgcccccctcccccgggggtagggaggagctgggccctggaggcaggcggcccctggcacccagggggaggggaggggctggcaagtgggggcctagaccctggaaggcaggggactgcgagctgggctggcggagcagaggtgcagaagcaactgagtccaagtgagtatggtggcagggaggccagggcaaggggagcagggcaccggggcagtggcacccagacgtgagcagggtcaggtgctctgggtgagggagcatcgctgtgcaccgctactgatttaggatgcaggagtgtgtggcttggggctgctttggggatgggctcggaccatcgctggggcagcgatggggctctgggaagaaaccacagagagaaaaaacaaagggccccccctcagcaccccttgtgggtgaagattttgcaggagaggtttccttggggttcccgagtgcggggcagatggggtggaggaggtctgcatctggccgaagaatggaaggatgtccaggtgatcagacacctgcaggctgcaatctgggaggtggatgggggcagtgggctgttagtgactgcattctagcacctgggcacatagcaggtgtgtgtgtgtgtgtgtgtgcgtgtgcgtgcacacacatggctgcccatgcaccttcctctgtaagcctcagtcgacttttcttcattaatccccactaaggacactttttatttttcgttacttttttttttttaagagacgggactctcactatattgcccaggctggtctcaaacttctgggcacaagagattctcccaacttggccttccaaagtgctgggtttacaggcgtgagccactgcgcccggccccaactacagaaactttttagatgcatttgtcctcatcccatccttcccttggcattttaatccaacagatctgctgtacatatgtttatggactgtggccacacacactgtaatagctgaggttgatttggcccccatcccgagaacttgttttccccgctgttaagagtgcatggtctacctgcttgtttcatgtctgcccgggcacgtgctcatcctcatctgcatctctctcctgtaccttcctgtcacaggtgcaagggcagcgtcggccaggtgtccatcggcgcgtgtctgagtggacgcgtctatagccatcctcagtgtgtgtgtgcagttccttgcatctttgttagcctggcatgcatgctgggctgtgtgtgtgtgtgtgtgtgtgtgctgaatgccagggctgtgtctgtccaggtgtgtgtggacagcagcagaggcattgcatgcacgccttgggaactatgtgagtgccagcccatccctgtgggcacaggggtccctgtgcctgtctgtgtgttcagggtcctgtctgggtgtctgtatgagtctccgctgcgtgtgcctgccccttctggctggggctacatctgtcacatttcatccccgcgattggatgtgtctgtgcatgtgtctctgtccgtgggaagagggcggtgaaggctgggaaaagcaattgcttggaaaccctggctgcaaccccaaggcaacccatggagcagcagggtgccaggggctcgctagcccccaccctgggccttcctggccctgctcaaaggccagccaggagtgcctgacccctttcttactccccacttaccctgaaagccccccgcaggctaaaacaccctctccccgagggaacaggactcttttgtaccggggaccagcttctggtgagggtgcggacaccaggggccgtctgtggggtgggagagggcggcaggaattcacgcggcatgtcgggaatgctgatactgtgaaacccagtcattgatggctctgggtccctgcccgccacccccaggccccggccgtgggacatctgctccctcactccactcgccacacccctcagtctcacccccgtaccccgatgcggtcgttcccccttccctccccacagttctctgacaccccagcttggagggagttgttgccagagagtggcttcgaggctgtgtgggagggtcccaggcacaatgggagggccacatgggcagcctgacaacaggtcacaacccatgcaggagatactgaagcgggggtgggttgggtgcctcaatcccgcccccttgcacctgagtgactcttgttgcatgcaggttgtctggcggcttcaggtggacccagaagacgtccccaactcagggagattcaggtgaggggcagggtaccaactctcttcccttgcttcagctttgcaatgctggccctgccttggctctctggttcttactttctggagatctccaggggcatcacggtgacaaagataatgatcagcacatcatcactgcatagagacaggacatgcagcaaagactgcagaccaactgtgtggccttgggcgagtcacttaacctctctggacctcagctataaaatgaggataatgcatcttcctcaaagagatccaatgagttaagacagcagaataagcagtgagggctggcacatggccaatgccatagaagggtttataattataagtaatagcagcaggctgggtgaggtggctcatgcctgtaatcccaacactttgggaggctgaggcaggaggatcgcttgagccaaggagttcaagaccagtctgggcaacacagaacatggcaagactcccatctctaaaaaaaataataataataaccaaataaataaactaaaataaaattagccaggcatggtggtgtgtacctgaggtcccagttactctgaaggatcgcttaagcctggcagattgaagctgcagttgagtgagccacgattgcaccactgcattccaggctgggtgacagggctgagaccccatctcaaaaagtaaaaagttaaaaaatatcagcagaccaggcatggtgatttacacctgtaatcctttgggaagccaaggcaggaatattgctggaggccaggagttgaagaccagcctgggcaacatagtaagaccccacctccacaaccatttccacaaaaaagaagaaaaattaactgggtgtggggtggcgcataccagaagctgagacaagaggataacacgagctcaggattttgaggctatagtgagctgttattgtgtcactgcattccagcccgggcaatgaaacaagaccctgtctcagaaaaataagtaaataaatgcataaataaataataatagcagcagcagctaacatatgaatgggccccttcctgaagcccagatggaacaccccctttcacttcccccagcctttaaccctctcctctccctttccagcgatcactcactcgctgtacagaatgatattcctcacggcactgcctctgttctggattatgatttcaggtaacggctgacaggtgctggggacctaaaggctttggcccctgagcaggttggaggtgggtccccgcagccccccggcatgtggttggggatgggagccggagggggtgatcgggtaggacgtgtccctgagcctcagctctcctgcttgcccgcagcctcccgagggggtcactggggtgcctggatgccctcgtccatctcggccttcgaaggcacgtgcgtctccatcccctgccgctttgacttcccggatgagctgcggcccgctgtggtgcatggtgtctggtacttcaatagcccctaccccaagaactaccccccggtggtcttcaagtcgcgcacccaagtagtccacgagagcttccagggccgcagccgcctcctgggggacctgggcctgcgaaactgcaccctcctgctcagcaacgtcagccccgagctgggcgggaagtactacttccgtggggacctgggcggctacaaccagtacaccttctcagagcacagcgtcctggatatcgtcagtgagtccccagcggttgtgcaggcaccgggagctggggcagcggggcgggaaggagtgtggccggaaggcctccccgcaccttccccagcaggcctggatggcagatctgggaggtgctgatttggctgggggtgcaaacctcaaggcccacgcagaccatgcagatgacagacatgaacaaagcagggccccaaaatagtcttgctgccctcagggggaaacaggtgctgctactcttttggaaacacctggagaaaggcagtggggccagggggtaggggcaaggctgctgggcccccactttagcgtggtgatcttgggcaagtgacttaacttccttgggccttggttttcttttccgtaaaatggggataagaacagcacttaaggcaatgagtgaaaagccatcagatgcccagagcagcacctggcacgtggcccccagctctggccaacagaaagcagggcggtggctgtcaggtgttctgaattttcaagataaaccagaattttggattctttggtgtaatctcctaattcttaaattttggttgctgattcagatttctttttttaaaatcctttaagccaaatagaatacagctatggccagacatggcaatcagaatagggcacactgcctgatttcagggatccccctgcctcatttctgagtggcgctgctgcttggagtcctcagcgctgagtccctatgagagagccgggttcaccctggtgcagaaagagactgcacaggtgcagtacacacacacaccactctacagaaatcacacactacacactgcacactctacctacacactacccacacaccacacactacacatacatcacacactacacaaaccacacaccacacactgctcctgctacctacacactgcccacacaccaaacatacacatcacaccaaacacaccacacacacacactacacaaaccacacaccacacactgcatacactacacacacacacactgcttggcgctgaggactccaagcagcagcgccactcagaaatgaggcagggggatccctgaaatcaggcagtgtgccctattctgattgccatgtctggccatagctgtattctatttggcttaaaggattttaaaaccacacaccacacacacaccacaccaaacacacaccacacacacacaccacattacaaaaactcaccacacactacacacacaccacacacaccacaccaagcacacaccacacacatcacacactacacaaaccacacaccacacacttcatacactacacacactacccacacaccacacacacaccacaccaaacacacacaccacacacacaccacactacaaaaaccacacaccacacactgcatacgctacacacacactacacacacaccacacaaacaccacaccaaacacacaccacacatccaccacgctacaaaaactacacaccacacactgcacatgccacacacacactacccacacaccacaccaaacacacaccacacacaccacacacaccacacactacataaaccacacatcacacactgcacatactacccacgtaccacacacacaccacacacctcataaactacacaccacacactgcacacactacccacacaccacacacactacacacactacacacaccacacacatacaccacacactgcacatgctacccacacaccaaacacacactacacactacacactgcacaaaccacacacacactacaccctatatacactgtacacatacatgcgccacccccacatcacaacacaaaccacacaccccacacacaacaaacatgcacaacacacgctacacaaaccacacaccacacacacaacacaccaaacacacaccacacacacataccacactacaaaaaccacacatcacacactgcacatgctacacacacacaccacaccaaacacacaccacacactacacaaaccacacaccacacactgcacatactacccacgcaccacacacacaccacacaccacataaactacacacacagtgcacacactacccacatgccacacactacacacaccacacactacacacaccacatacatacaccacacactgcacatgctacccacacatcaaacacacactacacactgcacaaaccacgcacacactacaccctatacacactacacatacatgcactacccacacatcacaacacaaaccacacactccacacacaacaaacatgcacaacacacactacaaaaaccacacactgcacacacaccacacagtacccaaaccacacgccacacaccacacactctacctacacactacccacacaccaaatacacaccacacaccaaacacacaccacacaaaccagacaccatgcacacaccacacacacaaaccacacactatacccaccacacactgcacacacacaccacatactacagaaaccacacaacacacactgcagacactacctctacaccaaacacacaccatgcgctacacacaaattacatgctacacaaaccacacacactacaccctacacaccctgcacacatacatgcactacccacacaccacacacataccacacactacacacagcacacacacaccacacatgatacaaaccacacaccgcatacacaccacatactacactcacaccacacaaaccacaccacacacacaccacacaccacacacaccacgtactacgcaaaccacataccacacacgacccaaactacacaacaccccacacacactgcacacatacatgtactacccacacatcacacacacaccacacatgacacagaccacacaccacatacaccacgctctacacccacaccacacaaaccacacatcacacacacaacacacactgcacacataccatacacaaaaaccacacactacacacatacatcacaaacacaccacatactacacaaaccacacacatcacactacacacatgcaccacacacccacaccacacacacacacacacacatacctacacacacacacactcacatgcccggcggagggtaaaccaagcaggcatgggagaggagagccgcttgggaagtgatgaggtgtggggagcccacgctgacgccagagccacagggtttgtagccagtgttacctggtgccagctgcagcctcagtttcttcatctgcaaaatgagcaaaattacagtcctcaccctctcgctttgcgggagggactggcaagttaaacgccgtcaagtgctctggccacgacactgtgattttcattacgatggcgctctggtggctccgtggagggctccggggtgaccaagaggaggaagggtaaagggaattctgaatctggaggcagggagcggaggcgataccgttgaggagtaccattgccagcaatggaggtggacaaggaggagggtgggtggggtgggaccgggaccgtagcccagtgctgctttctcagccctccctttccccgcctcgtatagacacccccaacatcgtggtgcccccagaggtggtggcaggcacggaggtggaggtcagctgcatggtgccggacaactgcccagagctgcgccctgagctgagctggctgggccacgaggggctgggggagcccgctgtgctgggccggctgcgggaggacgagggcacctgggtgcaggtgtcactgctgcacttcgtgcccacgagggaggccaacggccacaggctgggctgccaggcctccttccccaacaccaccctgcagttcgagggctacgccagcatggacgtcaagtgtgagcctgggtgcgggcggggcggggtggggcggggtggggcggggtccggggagggggtggacctggggatgcggccggaggcggggccgggccgtgatgggggcggggccatgcccagggccaggcagggattggggggttgggtgggacgggggcggaaccaggcagtcctggggcggggccaaggctgagggcggggccggacagtgttgggggcggggccgggctgggagagggcactgggccggttccccagcacctgctcactaacctcgctgtgtcgcgggccttagaccccccggtgattgtggagatgaactcctcggtggaggccatcgagggctcccacgtgagcctgctctgtggggctgacagcaaccccccgccgctgctgacctggatgcgggacgggacagtcctccgggaggcggtggccgagagcctgctcctggagctggaggaggtgacccccgccgaagacggcgtctatgcctgcctggccgagaatgcctatggccaggacaaccgcaccgtggggctcagtgtcatgtgtgagtggcccactctgtgcgtccacacgcccacctgcagccgagagataaagggaaaggggcctcatccagggcgagcatgggctgggtcccgaggggaccggccataaacagtcgaggccaaggtagacaggggggttgcaagtcaaggtgtaccttcattctttccacaagaatctggggaacacctgctctgcctcatcctccttccaggacaagacccaggcctgcctcctagggaagcctgttaactgcagcttcctgggggcagttcctggttgttctgggacttgatgtgggtctggtcccaggaatctgcgttttactttataaaatttttttggagacaaggccttgctctgttgcccagtctggaatgcagtggcaccatgatagcaccacttgccctcaaactcctgggctcaagcaagcctactaccccagcctcctgagcagctgggcctacaggtgtgcaccaccacactccaggctaattttcagattttttttgtaaaggtgggattttgctatgttgcccaggctggtatcaaactcttgggctcaagcaagcctcccacctcagcctgctgcgctgctgggcccacaggcaggtgccaccacacccagccaatttttctatttttttatagagacagagaatcgatatgttccctgggctagtcttaaacttctgggctcaagtgatcctcccgcctcagcctcccaaagtgctgggattagaggcatgagccaccgtgcctgtccaggaatctgcatttttaaatgaattccattgtagttctaatgagagggttgaggggacttcaggcctcatccagccccttgtatgcacatttatattactgggccagcaagaagggagctggtcagaagaggattcttagctgagaaccaaagagataccattcattcattcacaaatgtgtactgaggcaaagtgcccagcactggggatattaataatgacagccgcagccaacatttactccacagctcttgagtgctttttttttttttttttttttgagacagagtctggctctgtcgccaggctggaaggcaatggagcaatcttggctcactgcaacctcccacttccctgttcaagcaattctcctgcctcagcctcccgagtagctagaattataggcgcacaccaccacacctggctaatttttgtatttgtagtagagacagggtttcacca[137 bp omitted]tggtcaggctgctctcgatctcctgacctcaggtgacctgcctacctcagcctcccaaagtgctgggattacaggtgtgagccaccacgctcggactcctgcatgcttttgacatgcaatcttccccccggcattccccacggctggctctgcccacctcctaggctcgctgaagccttcccccatcatcctatcccaaactgtaactaccctgattttccataccctcagcccctttatttttctctacacacttcttcccatcttacaaattacatattttatttaattacatcggctgtttccacatgggccttgttcaagctagagcaatgcctgtcactcagcaggttctcagtgaatgttggatgatcacccctatgaggttggaactattatgaagcccattttccagatgagaaaaatgaggcccagagaggttaagatgtgggtccacacacaactggacaggggtagagtagggatctgaagacaagcatgctggctaccaagctgctgttcttggaaatgagatagccaggactggggtcacctgagccttcctgaaccggtgtgctaggtttggggtgggatctggggtcatatctggggatggtagttggctggcagaagaagcacctcctgggttctgaccatcagtcccgtcctaccccgcagatgcaccctggaagccaacagtgaacgggacaatggtggccgtagagggggagacggtctctatcttgtgctccacacagagcaacccggaccctattctcaccatcttcaaggagaagcagatcctgtccacggtcatctacgagagcgagctgcagctggagctgccggccgtgtcacccgaggatgatggagagtactggtgtgtggctgagaaccagtatggccagagggccaccgccttcaacctgtctgtggagtgtgagtaccttccgctcccctatgctggggatggacggttccgtgggggacaccagggttactgtgggtgcccacgcatcccaatcagtattggctttgcctgtcctccgcagagacaaggaagggagggcagggaagctgaattcacagcaggaaaataaaatcccatctgagaatattgtgttcccacatccgggagtgggcttttttttttttttttttttttgagacagagtattgagtcttgctctgtcacctaggctggagtgcagtggcaggatctcggctcactgcaattgctgcctcctgggttcaagcaattctcctgccccagcctcctgagtagctgggattacaggcgctcgccaccacacctggcaaatttttgtatttttagtagagacggggtttcgccatgttggcctggcttgtctcaaacccctgacttcagatgatctgcctgcctcagtctcccaaagtcctaggattacaggcgtgagccaccacgcgcagcctggggtgggcttttgaccagtgaaatttctggatcctgtggccactgcccctctgcactaaccgaaacaatgaccatgatctctaacctgtgtagagtgtcgctatgtaccaggcactgttggaagcgctgtacagcaacccactcatttaatcctcatgacatcttcatgagggaggttctattactgtttccctgtttacggagaaggaaactgagacccagagaggttatgccacttgcctaagttcccacagccaggaaatggcagaatttgaggtttgaatccaggcagtctggttccattcttcttccctgcccaaggctgacctcatcctatgttatgacagcagaatacattgatggggtaattgctatacacaaaaggctgtgcggctctgtgagaggtggaggatagggctgagaagacaccacgcttatgaacaggtacagaatagctggagagatgacacagatgcacataaaaagctactgtcttggaaatgaaactcaccattgcaccgctggccagcgcctctcatctcctcactatggactgtgccaccatctcccaccacccctacccccacagccatcactccaggttgtagcagccaagtcacagttttgactccccttccttaagcaattccctctggaatatcgccttcctgtttccatttcccctgcttcctcccaagttcctgttggcttctagcactcctccccaaatttcacctctctggtcttcacgatgcccacaatggcccccaccacacaagtttgccagaaggttcgatgacattcaacatgcaaagaattcaaagcagtgtctgctacacagtacatgctctgtgctgtgtacatggcgacaatcagtacatggcagatacaggttagtcctcgggggcaacctctcgtggcaaagccgtccctctcctgctgacctataatcttcaggcactttccctcctggttctgttccctagcggggctgatgtgatcctggcgcggggctgcgtggtcccctgctccctccaactgtgcgtgctatcctgggccagcttccccctctggttgtcccctgatccctgttacaccccacaccagtgattcttcagtttaagagtcagagagaggagccgatgggagtacttgaacaagcctgcagcaccaactcacatacattttccggtggggtgcagatctctcctttatagtaagagcagcaggcagcaaatgcgcgttaggggcctgccctgggccagaccttgaatcctctacagctgttttctggttcagttcttatttttattattattattattttttttttgagactgagtctcgctctgtcacccaggccagagtgcagtggcacgatcttggctcactgcaacctctgcctcccagattcaagcgattctcctgcctcagcctcccaactagctgggattacaggcatgcgtcaccatgcccagctaattttttatttttagtagagacggggtttctccatgttgcccaggctgttctccaactcctagtctcaagtgatccacccgcctcggcctcccaaagtgctgggattacaggtgtgagccaccatgcccagcctatctggctcattttcaattctagggtcaccctgtgaaacaggggtgtgttataattatcccctttaccaaggagaaaactcaagggcggaattccctgaggccaggcagctataaaagtgggtccgagcccgataattccagactcctgtctgccccagctgttaaacctctggctgcctcacctccctcacagctcttagcactctaggactcaatccggcttctcttgaaaacgaacacgcaggcagatgtggagtgtgcaggcctcacctgctagacttgaggggagcagtggccctgtcccctgccccacctgccagctccctactcttcacccaggcctgtgtcaaagtgcttgcccttggagagtgcgaccctcaggccccctccctctccacacagtcaatgttccctggcaccaggtctccaatgttcactgacagtggtggtgacccttgagcagggccttctgtcttacctgccaaccccagagccctgaacggcacggggcatgcaggaagtgtgcaaccttaccgagtgcctgagatgtctagggaactagcttgagtacgttgtacgcattgacctattttgttcttacaaccatgtgattgaggggagggtaccattcttcaacccagtttaatacaaggaaacagaagtttgactggcatccagtcccaacagggctgaacagacctgggctagaatcccagctctgtccccatcctcctgcctgagctcaggcgagtgacttcagctttgcaacccttagcaagggttcataacagtatcttaccacaaagatggctgtgagaactaagagaattaggctgggcgtggtggcccacacctgtagtcccagcactttgggaggctgagacagttggatcacttgaggccaggagttcgagaccagcctgaccaacctgacaaaaccccatctctactaaaaatacaaaaattagccaggcgtgatggcgcacacctgcagttccagctactcaggaggctgaggcaggagaatcgcttgagcccggggggtggaggttgcagtgagctgagatggagccagtgcactccagcctggatgacagagcaagactgtcccagccccccactccagcctggatgacagagcaagactgtcccacccccccactccagcctggatgacagagcaagactgtcccatccccccactccagcctggatgacagagcaagactgtcccacccccctactccagcctggatgacagagcaagactgtcccatccccccactccagcctggatgacagagcaagactgtcccacccccacactccagcctggatgacagagcaagactgtcccacccccccactcccccacaaaaaagaagaactaagagaacaatactgagtgttcatagtgctacatactctgtggatattggatgtcatcatctttctcactgatttttcctttggactccaggttaaatatttgttgtgtgttttgctgctgaggttttgctcatgtgacctctctgcgggaatggttctgtctatccacccatgagtacttgggtgggatgttacgtatttttaattttaattttttatttttttgagacagggtcttgctctgttgcccaggctggaatgcagtggtttgatcatcgctcactgcagcctcaacctcctgggctcaactgattctcacacttcagcctcctgagtagctgggactacaggcacacatcaccatgcccagttaatgttttaattttttgtagagatggggtcttgctctgttgcccaggctggtctcaaactcctgggctcaagtgatcctcctgccttggcctcccaaagtgctggaatgacaggtgtgagccactgcacccggctgggatgttaagtgtttacaacacacttgcgcgcctatcttcggagtcccgtagccccttgtgagttactgactgtaaccccctggtttgcacagatgagaactccatcctagaggcccaggagcctgagtggcctcacccagccagtagatggcagagctgggattcaagccaaatccatcccaccacaaactcctcattctttgtacctttgtcttacaggtttgtctagagtcccataacagtttccgcagcttcacaggttgtctgaaaagatactaagcacgtgcaccggcagggtgtcggcgttccgccgacatccaggtcgaacactttgtcaccagagcaccagtggggctgtcttgagtggaagtgctttgaaaaagttttatgtctgtcggttcaggttcgctgttattaatgtactccgtggcgtgttagctggttaacgctatagcaagcatattgcagctctgcccgaacaggactttttattcagtagacttagagatgtttgcacagaggttcccattcctgccgtgaatccgtgtgcccgtgtgactcccaggtccaccaccgttaccggcacattctttttgctagcaattgaaaataggtggggtaggtgagccaagggtctcttgcctgtgtgtaagtgggttttggtgagaactcactgagaaccagtgctcagtctagagcaagccaaggagggtgctggactctcaggccaagaaagagaacacagtttaaaaagcagcattctgtgctgtaatacaattgcgtattttggtacaaaaattagccaggcatggtggcacgcacgtgtagtcccagctactcaagaggctgaggcaggacaatcacttgaacctgggaggcagaggttgcagtgagcagagatcgtgccactgcactccagcctgggcgacagagagactccgtctcaaaaatcatagtaataacaataataataataataatttcctgttttggaaaatgaaagaaaaaacctaccagtactatttttgtaatccagtggcagcaaagcaaagctcaaccaagtgactttgggtggagggtggtgtttggtgctagtggcaggagggaatctcatgggtgaggaagggccggggttcaaggcggctttaggggaggaagtggggggcatctgcagcgcagactgaaaggaaggagcacagcctggaagccagaaaggaggggatagtctaagcctgtgtgagccccaagggtctggggaggccgggggctgggagagttccatggttcctcccttctacgtgtggggcccagagtggagaaggagcaagcccctgtcttgatggaaacaggaggccccttatgtaagtgtgtgatgcagggagggtgagtgctggggaggagaactgagtgaggcagggagtgaatgatacgtggagcgaggtgcagcttccctgggtggtcagagaaggagacgccgcatgggtagaggccagtttggagcgagggagggcgttccacaggcaactgatggaagtgttccaagttgagggagaaacgtacagaccctggagtgggagaaagctccacgattttcagacacagcaaggaaccggtgtggctggaaaggactaagccagggggagagaaggagagagtgtgtggtcaggcagggcctgaggggccttgtagatgaaagactttgtattttgggctgggcacagtggcttgcgccttataatcccagcactttgggaggccaaggcaggaggattgcttgagctcaggagttcaagaccagcatggggaacatagcaagaccctgtctctacaaaaacaaacaaaaaccctccagtaactatcatgagtatgacagatttaccgtcctctgcaattctgaacataaagctttaaaatcaaaaggctttttgcaaatttggcaccaccctgatttgacagcaaaatctcgcctaaagaacacaaggctgtttgtaatctatactgatttcatttagggtgaatattcgtactttttgctgtatacattacattgaactatgtgaaat[131 bp omitted]ctgcacttcagcctgggcgacagggccagaccctgtctctaaacgataaaaaataaaggatttgtattttaggtgaaccacggagcaacagaaggagggttttgagcagagagtgccatgatctgatttatgtattacaaggtgaatgaggttagagagagtgtaagagccagggcccaggagaaacggcccgtccctgtgacatagtgctctgtccaggctgaagctgaggctagagtcgcctcaaaagtggcaccagaagaattgccccaagagagcaccccaaaccaccccgaaatgaggccacttgggattccaaagagagaggcactaaaccaccaggtgatcatcagtccaaagcatttgggaggggaacttgcacagtgctacggcgagagaaagggagggtctacccagacacgtccgtgagggtcagggtatgggtttacatgagggtttaaggaatttggcccagggctggggctggtttctttcattctttcatttttgttgttgttgttgtttggggtttttttgagacagcgtctcattctgtaacctctcgtactcctgacctcaagtgatccactcactcttcggcctcgcaaagtgctaggattacagcagtgagccaccatgcccggcctctttcagtgttttgagcaacaacctaaacacctttatcagtgcctgggaatgttcaaggccccaggcgtgggttagtgaagcttgcagtgaaaacaggcagccggcggggtcgtagtgaggtcaaggcgctctcagtcaggacagagaaaaaaggaggggaaattggagggccctacaggaagctaccgcccccatccttggccacactggccttgccttgagccaaggagtctccggggccgggcctcgcgttggctccgggccaccctcagacctgattttgcccctgcagtcgcccctgtgctcctcctggagtcccactgcgcggcagcccgagacacggtgcagtgcctgtgcgtggtgaagtccaacccggagccgtccgtggcctttgagctgccatcgcgcaatgtgaccgtgaacgagagcgagcgggagttcgtgtactcggagcgcagcggcctcgtgctcaccagcatcctcacgctgcgggggcaggcccaggccccgccccgcgtcatctgcaccgcgaggaacctctatggcgccaagagcctggagctgcccttccagggagcccgtgagtggcgtggacttggggtgggagccacaggagggagcgggcacgtcttagatccaagctcccaaggctgaccaacagccacagagcatgggctatgcagattgacagaaaggtcaaattctccctttccggttggagaggagaagccgccctgagtttgccccgagtttgctaggacctttgaggcatgagcccctccccagggccctctagcatgaaagggattgccctggcacgaggaggctccgtgccaatcagtcagtgcaaggatgccccggctgtgtgactacattgactgtcatcccagcatgtctccaaagttctcaggtgtcgtcaccaccacccatagccctaagggcgcctgggtcttttctgtcctcagatcgactgatgtgggccaagatcgggcctgtgggcgccgtggtcgcctttgccatcctgattgccatcgtctgctacattacccagacacgcaggaagtgagtgccagctggggctgatctggggatgggagtctccaaaaaggggacctggtgggagatggaggcccagagtgggtgggggaaggcagcaccataagtgtagagaaggcagattctgttctgggaatgttcagctggacagaggagagagggttcctgttaattccagcccctgctggtcaggggcacaccagggcctgggctgagccctttacacacatcatttgagacctgtttgcccacattctattttgacagcctccctatctctaggaactctcccctacacactccagtgtggtggggaaagcccaggtaccccactgcagccacagcagcaggtccacttgacgccagaagccccaaagattacacacatctggggcaaaaaaaaaataggccttggccgggcgcgttgactcacgcctgttatcccgcactttaggaggccaaggaggaaggattgcttgaggccaggaatctgacaccagcctgggcaacatagcaagaccacatctctaaaaaaaatttttttttaattagccaggcatggtggcacacactgtagtcccagctacttgggaggctgaggtggaacgattcttgagctcaggaattagaggccagcctgggcaacatagggagaccccatctacaaaaaaacaaaaaaattagctactagtggcacgtgcctgttgtcccagctactcgggaggctgaggagggaagatcgcttgagcctgggaggttgaggctgtagtgagctatgatttcaccactgtactccagcctaggtgacaaagagagaccctgtctctaaaaacaaacaaacagacagacagacagacagaaagcctctccagccccaaaccatacccacctggcccaactcagctgcagccgtgtttctttcttgtggcacacacacatcagctgtcctgagaaataaattaacccctctgctccacatcctggtggcaagaggggcagaaagacccagagcctatgaggggaacctggagaatccaggtgggggtcctgaaaaacggcagagctcaggggccaggtggctcgtccccagccgggcaggggccacagaggtgggaaggatgggctgtgtgggtaggagaggctggtggttctgaaagggctgcttgccacatcttagagatgggtgggagaactctgaggtcccctgagccaaactcctaaaacacgtgggggtgcagaaagggagggcagagagaggtctgacgagtcctgccctgcagaaagaacgtgacagagagccccagcttctcggcaggggacaaccctcccgtcctgttcagcagcgacttccgcatctctggggcaccagagaagtacgaggtaaggaccaggctccaggctggcctgggaacctggatgccagggacactgaaggcctgggaaaggcctgtgaggccaaggggcaggggagtgggagcggcctctcacaggaggagaggaaggacattccagggctgggttggacctggaggctggggaggaggtgcccaggccgaagctgtgtagggggcgatgggacgtggggcctaagggccccctcccctccctgcctgtgtctgtgactgcatttccttctccaatagtccaaagaggtttctaccctggaatctcactgagtgccccaggaggtaggttccgggggcctcagtgtgccctcctctgggccctccttgggccctggggttggcgtgcatgtccgtgtgtccctgtcaggcgtcaaggtggtctctggtgatgtccgggcctgcccggcagtgctggccttgtctagtctgtcctgttgcagctcccttctgtctgtggccaccgtcctgtgtgtccaaattcctgtggctagggggtggagggaggggtgggaagcgtggggggaacccacatgtcacctgcaggacctcccagattgagggcggacccatgcaggacccatgggggggcacgtaccaaaccaggtatttccaggaatttggaaagatggggtcctgactaggtggttttcacccaaaaaggtattaggggttacattgtgtgccctcaaaactcctatgttgaaagcttcctggacgggggcagtggctcacacctgtaatcccacaactttgggaatctgaggcggatggatcacttgaggtcaggagtttgagaccagcctggccaacatggtgaaaccctgtctctactaaaaatacaaaaaattagccaggcgtgttggcaggtgcctgtaatcccagctacttgggaggctgaggcaggagaattgctggaacccaggaagtggaggctgcagtgagcaaagatcgagccattgcaatccagcctgggtctcaaagaaaaagaagaagaagaagcagcttcctggagaaactgaatttgtaggcaaatttcaagttcagcaatgattaacactggcagaagctccagagtgggacctggtgaccgcagggctcgctgggcctgcggtccttgagaaaggaggttctcgcagggatttatttgggactgaactcaggagctctgagggtgcaaacgctctgtcctctgcattgggaaaaggcagggagcaggaccctgctaatgggcggtttcccctcttagagcgagaggcgcctgggatctgagaggaggctgctgggccttcggggtgagcccccagagctggacctgagctattctcactcggacctggggaaacggcccaccaaggacagctacacgctgacggaggagctagctgagtatgctgaaatccgggtcaagtgaaggagctgggggcagcctgcgtggctgacccccctcaggaccctcgctggcccccactggctgtgggctcccttcctcccaaaagtatcgggggctggggcaggaggggagtgaggcaggtgacagtgaggtcctgggggcctgacctccccctccttcccagctgcccctccctgccagcacccccacgccctcattacggctcctctctaacctcctttaccctcatctgtctggaggggagctctgtctgtccgtgttatttattgctacttcctgcctggtctcctgcccccacacctggccctggggcctgtacaaaagggacatgaaataaatgccccaaagccaaatgccagtctagatcctgatgctttctgacccgcctttgggcagcctgccatcccaccgtctacagaacgatgacagaatttctccttgccctcggctgagcctggtatgcaggcaagggcccagggattttagccttgaacccagggccagtggccactaagttgctcccactctgagctggtagctgcgagctgggtctggtttgacttatggatgatttcacataaaaatcctcatgctggtttttgccgcagtcagatcagctgacagcaccaggcttgcacttgtacgtggacatgacttgctgaaagggagggtcctgtgcactggccgcagtccccaccactccctattgtcccacacctggccggcttcctgcactgagattacctcctggtccctgcagcttggagtgcgagccacagatctaggtctcaccagcccgtgttggtttcaccaccatctctcacattcatgctgcaatttgcagcgtcagcctttatacatcactacattcagttccagaaacattaattaagcaccagctgtatactgagccctttctagaggctcaggctgtcctgagaagggtctcctaggacagctctgtgacgatgagaacactgagacttagagaagttaggtgattttcccagggtcccagagctcggaaacggtgtgtccaggccatggggttgatgcttctgattcaaatgcactctttcttttcttttcccttcctccctctctctctctctctctcttttttttgatggagtctgtctctgtcacccaggctggagtgcagtggtgcaatctcagctcactgcaacctccgcctcctgggttcaagtgattctcctgcctcagcctcccaagtagctgagatcacaggcactcgccaccacgcccggctaatttttgtatcaaatgcactttttctataatacctgtcaggaagttaaaaagggccagagtgtctggtataaatgggattgataactaacagttgttgaacgctttctatgattctacccagtttgcattaattaatctccattaacctcatttaccttccctaataactatgacaatggttctcaaagtgtggtccctaggcagcagcatcagcagcacccaggaacttgctaaaaaggcaaattttcagcccccaccctagacttcaggaatcaaaaaccctgaggtggggcccaggaatctgtgttttgagaagtccttggtggattctgatgcacgtgcacgtttgagaacaagcagctgaagcatggagaagttacatcagttctgtggtccccaattgttagcagtggagcccagatttgagccccgaccactggcttcggaggccacactctgacgctgtgctacacggccatcttggtgagaaccaacagctgctcacagagcccgggtgctggaggagcagtaaggttaagctgtgggctgcgggcagtgagggcagggtttcctagacggcagctctccctgatttttttttgttttttgttttttttgtttattttttgagatggagtctcactctgtcatccagtctggaatgcagtggcacgatcttggctcactgcaacctctgcttcccaggttcaagcacttcttctgcctcagcctcccaagtagctgggactacaggcgtgtgccaccacacccagctaatttttgtatttttagtagagacggggtttcaccattgttggccaggctggtctcgaactcctgacctcaggtgatgcgcccaacccaccctcccaaagtgctgggattacaggcatgagcccctgtgcctggtctctccctgcattttgaagaaggcagaggacacagcacagagaccaaaataaaggcctagaggcaggaataaacaaaccaggtcgggaggggaggtgacatggggctgcttggctgggatgggaagtccacatgcaggaggaaaggagacgtgtggggggccgggctgtgggaagggaaaccctctgtggggcctgtccaagctgggagggtgcatgccctttcttcacggagctcacagtcttgcagggacaaggacatgaaagaatctcatgcacaatatcaaactgcaactgtgacaccggcttccaaggagaagctcagagtttttacagcaggggtccccagtgctatactgcacacccagatactggtctgtggcctgttagggactgggctgcacagcaggaggcgagcagccagcgagcaagcatgaccacctgagtcctgcctcctgtcagatcagcagcggctttagattctcatagcagcacgattcttatcgtgaactgtgcacgcaaaggatctaggttgcacactcacagatggtgcctgatgaactgtcactgtctcccatcacccccggatgggaacgtctagttgcagggaaacaagctcagggctcccactgattctacatgatggtgagttgtatacttacttcattatatatcacaatgtaataataatagaaataaagtgcacaataaatgtaatgtgcttgaatcatccccagctccctccccactctcaggcccatggaaaaattgtcttccatgaaaccaatccctggtgccaaaaaggttggggaccgctgtgtgacttaaggtcacagggggcaggggaggcttccctatggaaggaaactcacacatgtgtgaaggccccaagtgggaacatgtttagcaaaattccaggagctgaagcaaggccagagaggcatcggatggggctggggatacacaggggcctctcagcagccgggagggaagcctcttccagatcccctgcatacatgctcaccagccctgccctgacacacctgtcccctgacgacagactctggctccagcaggtctggcctgggaggacttcacccagaggagcaaaacattgtcaataaccagggatcggggagtaactcacgctgcccaaagtgcagcttgagggccctgggagccactgtgacgctactgtgtatgcttcatttagtatgcaccggaacaacaggaaaccagaatgccgcaccagcttcggatgaggctaagtcaaaataaataaataagaaagaaatcaatcaactgaactgattttaaaaatgtattaaataaacatgttgcaggtggctcctgaaggttgtaggcaaacctctaaagtttgggaaacaatgagggaatttgacacaaagaccatccttaggagggaccg[131 bp omitted]gcgagaccctgtctctacaaaaaatacaaaaattaggcaggtatggtggcatgcgcctgtagtcctacctactcgggaggctgaggtgggagggatagtttgagcccaggaaatggagtttgcagtgagccgagattgaaccattgcactccagcctcagcaacagagtgagaccctgtctcaaaaaacgaacaaacaaaccagtaggacctgaactcaagttcactctctcagactttccccacccagctcctggaccccaccagaattcaacacatgctcactgagcacctctgtgtgccaggcctatgctgggccccagggtcacagcagtgcccaaaaagaatcactctgtgacctcccagagctgacattctgcagaagagacagacaacgatcagaaagacaagcaaacacatgaccgcacatctgacagtgaaggaactgcagaggggtgcaaggtcaggctgtgctgggtcaggctgccatttcagaaagagaagtcatttgacttgagaccagaaggaagtaagggagggagctctgtgggttcctggggaatgtgggtccagggaaggccaaaatcgagtgcaaaggcccctggcgagaatgtacttgttaccttcatggaacaagaaggaaagaagcatgcttgagtggagtgatggagccagagtggttgcccaaggaagctcgattacacagggccttgtaggccacaggcaggactggggcttgtttgtttgtttctttgtttgtttgttttgaggcagagtatcgctctgttgcccaaggaagctcgattacacagggccttgtaggccacaggcaggactggggcttgtttgtttgtttctttgtttgtttgttttgaggcagagtctcactctgttgcccatgctggagtgcagtggcacaatctcagctcactgcagcctctgcctcccgggttcaagcaattttcctgcctcagcctcctgagtagctgggattacaagcatgtaccaccacgcctgtctaatttttatatttttagtagagacggggtttcaccatgttgaccaggttgctcttaaacttctgacctcaggtgatccacccgcctcagcctcccaaagtgctgggaatacaggcgtgagccatcccgcccagcaatggaatttaatcctaggttttttttttttttttttttttgagatggagtctcgctctgtcaccaaggctagagtgcagtggcatgatctcggctcattacaacctccgcctcccgagttcaggtgattctcctgcctcagcctcccaagtagctgggattacaggcacgcaccaccatgcccaactaatttttaatagacacggagtttcaccatgttggccgggctggtctcgaactgctgacctcaagttatctgcctgcctctgcctgccaaagtgctgggattacaagtgtgaaccactgtgcccagccaggacttgggctttcaaagagcgcgttgagaagccgctggagaagtgagttcggaggggtgtgatggcaggcttgaggcttcagaggcccactggcagctgcgtggacagtgagcacaggctatcagtggaggcagggacagggcttgggaggccctggccattgtccaagagagaggaagtggagatggggagaggggtggggtcaggacccattttggaggaggaagtggtgagactcacttgaagagtcaaaggtgactccagcagcttccttaagaggttgaagaaagcaggaggggcaggttcagtggagaacgcaagagtgatctactccggccgagttcaggcccagggaggccctcagggacagggaaggcagatggcaccccctccctgggaaatgccaagccgaggaagagtcagaacacatgacacagtgactcagagagatgggggcagacgctgagatgagggttggccaggcaggaaggaaggtgagaaggtctcatggcctcacgtgccagtagggctgggccaccacgtgtgggagggaggacacccaggcaccaggccatggtcatgacacgggtctctttgtccctcccggtctgccaacctcctgagtcactcctgacggagatgactgatccatccctggcccgcctcccaccctgtccctgggacagtgcctggggcaggcagctccattatcctccttgatgaaagagctcccagccagcactggccactccagagcctcctccccaggtgggtgatcatgcagggctgggctcttgcgactggccgggggtagagatgcaccgcactgctgagaagtgctttctaggagttcaagaccagcctgggcaacacagcagacattgtatgtagaaaaaaaaatgtttaaaaataagctgggcacagtagtgcatgcctgtcatcccagctactcaagaggctgaagcaggaggaccacttgagcccaggagtttgaatctgcagtgagctatgagtgcaccactgcatgccagcctgggcaacagagtaagactcagtcactaaaaaagaaaaaaaaaaagatcgaatgtggtgctcatgcctgtaatcccagcactttgggaggccaaggcgggcagatcatctaaggtcaggagtttaagaccagcctggccagcatggcaaaaccccatctctactaaaaatacaaaaattagccaggcgtggtggtacgcgcctgtagtcccagctactcagaaggctaaggcaggagaattgcttgaacctgggaggcggaggctgcagtgagctgagatcgcaccattgcactccagcctggacaacagagtgagacttggtctcagaaaaaaaaaaaaaaaaaaaaaaaagaaagaaaagaaaaagggggagaaaaaaaggagaagtaggcgagcctctttctttccccactcttctcgctctcaactccaggctgctccttaaacaggaggtgacaacctcaacctcgcaaattaaaaaaaaaaatcttttaattttgaaataattatcacaggaagttgcaaagatagaacagagaagtctggcagcagctgagccaaaggccccttcccaccctagagctcgatctgcctggggagcgggaaggaaatgacagtttagtcccaaagggcctctctgtgaagctcaggctagggctgagtagccagaggtgggtgaattaatgtctgcagggagtgctgggtcagcagcgtaagtgacaatgtctggaataatgacagctcacttttacagagagcccgttccatagcagccaccatgcaaagtgctgtaggggctggggacctgtcacagcatagccctgaagtcataacagcaatcttattatcaccctgggagggaaactgaggtgatgtcacaacaaacacgtggcagacctgggactggaacccgggtctttttaccacatgcttgtcatgggatgtgcgagttgctgagtgtgtcctgtgtgtgctgtcaccagcccggtgaggaaggcactatcattgttcccgtcttaccatcctgggcagaggttggggggtgagggggacatagccaggcagggagtagccacccagggctcacagggactctgttagttgcctgctttcactgcttccctggtaaaggggtgacagtcaagtcaccaaaaaaggagaccaacgacctgtttgaaggaacagggaggaagagtgaaagcgccgaggctgcgttctcaggagtcctgctcctcctcccttgccttctccacgcagcccttggcctccagaaatcaagacacgtccacaagcccaatctcctcctgttagaagactatgagccacacctggtgctgtggcctgcagaaacctcagctactccttctaggtgaggagcaggaattcaagccccaaagggtaccctccctgagacctttgggacctggccacctggcttggagtcccccattgagattcctgggattaaaaaaataaaaatatacggccaggtgcggtgactggctcctgtaatcccagcatcttggaaggctgaggaagtggattgcttgaggacaggagttggagaccagaatgggaaatgtgagaccccgactcaataaaaaataaaaaataaattaacggggtatggtggctggtacctgtagttctagttactcaggtggctgaggattacttgagcccacctcaagttcaaggctgcagtgagctatgatcacaccacttcactccttcctgggtgacagagcgagactgtcttaaatttttttttttttaataagtatagattcacagaagttgcaaagatagaatagagaagtctggtgtactcttcacccagcatcccctgatggttacttcttaagtcattcaggacaatatcaaaaccaggaatttgacattggtataatgtgtgtgtacagttctatgtcattttatcacatctggatgtatataacaacaactgcagtccagatacagaattattctgttactacaaagacctcccttgtgctactcccttcatagtcagacactttcccctaccatccctaacccctggcaacttttcatcttctccacctctatcattttgtcatttcaagaatgttatgcctgggcgtggtggctcacacctgtcatcccagcactttgggaggctaaggcaggtggatcacttgaggtcaggaatttgagaccagcctgaccaacatggtgaaaccccatctctactaaaatacaaaaattagccaggcatggtgttaggcaccttaatcccagctactcgggaggcttaggtagaagaatcacttaaatcctagaggcagaggttgcagtgagccgagatcgagccactgcactccaacctgggggacaagggcaaaactccgtctcaaaaaacaaacaaacaaaaagaatgttgtaacacatgtgatccttggagactggcttttttcactctctgtaccactcttcagaatcgtccaagttgttgcctgtatcctcttcatatctcactcctttttattgctgcatagtactccatggcatggatgtaccgtaatctgttaagccactcacctagtgaaggacgtattggttgtttccagtttttggttttgcttttttttttcttgagatggaatcttgctcttgttgcccaggctggagtgcaatggcgtgatctcggcttaccgcaacctctgcctcccaggttcaagcaattctcctgcctcagcctcccgagtagcttgtgttagaaatgcttgatttttggtgctgtaaagaaatagcactttaatgtaaatttaatttcttcagcaaggctagttttactttctgcagaaagggtatactcgctagcagttttgctacaaaagtacactgaacaaaggagacagggtcatttataacttgatgcatctactttattgctgtgtctggtttctattggctgaaacgggacctcacattctgtatttgtctggattggctagcaacttagaactttttaaaagaggcaaaggcagaggagaacaaaggaaggagaaagtaacgtggaatactgagaaaagtaaaaacatttctaaataaggaagaggaacaggctttgacttaatgctttcttggactagtataagcatgctagggcaaatctttaggctaaattgtaggatctaagaacataaagtacattgatttttttattatggctagtagatatttaagaatgttagcacaggtctttgaataaattttgcttctaagagaagttactatttattcttaattagatggggaggacagtctctttgaaaaggaacttctactttactatttacactgggattaccagcatgtaccgccacgaccagctcattttgtatttttaatagagacaggatttcacaatgttggccaggctggtctcgaactcctgacctcaggtgattgccctccttgg[138 bp omitted]taattgtgtgcaggtttttatgtggacatacgttttcatttcttagggataaaatgcccaggagtgcaattgctgggtcatctggtaggtatattttgtttagtttttcaggaaaccggcaaactgttttccagagtagctggaccactttgcatccccaccagtcgtgtgtgaatgtttcaagttcacagcatcctcaccagtgtttggtgttgtcattattggttatttaattttagctgttctaaagcggtatcttgtcatgggtttcaatttgcatttcactaatggctggtgatgtgagacatcttttcatgtgcttatttgccttctatataccttcttcagggaaaggtgtcatcatgtcttttgcctattttctaactggactgttttttatttatttatttatttatttatttatttatttatttatttagagacagagtctcactctgtcgcccaggctggagtgcagtggtgggatctcagctcactgcaacctccgcctcctgggctcaggtgactctcctgcctcagcttcctgagcagctgggattataggcgcacaccaccatgcctgctaatttttgtatttttagtagagatggggttttgccatgttggccaggctggtcttgaactcctgacctcaggtgatccactttgcttcccaaagtgctgggattacaggtgtgagccatcgtgcccagcctgatttttattttatatatatatatatgtacacacacacacacaatatacatacacacacatatatgcacacatatgtgtgttaaagctgtatgtaaagctgttatatattacatatatactacatatataacagctttgctgagatataattcacataccataaaacacacccatgtaaaatgtccaattgaatggttttgggtctattcactgaattatgcaaccatcaccacaaccagttttagaacatttcatcaccccaaaataatctcacatccattagcagtcactcttcatttcctcttacctttcccaccccaccccagccctacgcaaccgctacatctacttctgtctctacagatttgccttttctgaatatttcacgtgaatggaatcatacaatatgtgacattttgtg[136 bp omitted]catggtaaaaccccgtctctactaacaatatgaataattagctgggcgtggtggcggatgcctgtaatcccagtcactcagaaggttgaggcaggagaatcgcttgaacctgggaggcagaggttgcagtgagccgagatggcaccactgcactccagcctgggcaacaagtgaaactcggtctcgaaaaaaagttcatccatgttgtagtatctatcagtacttcattcctttttattatcaaataatattttattgtttaggtctcccatattttctttattcattcatctcttcatggacatgtgggttgtttctgctttttggctttcatgaataatgctgctgtaaacatttgtgttcaagtttctgggtgaacatgttcttatttctcttggttatatatgtaagagtggagatgcaggagtgtatggtaattctatgcttaatctttggaggaactgttttgagacttttttccagagtggctggacaattttatattcacactagcaatatataaatgatttagtttccatacatctttccagtatttgatactatcttttattttagctgttcttatagatgttagtagtgatatctcatcatggtcttaacctgtctaaaggctagtgatgttgaatatctttttagataattattttctatccatatatccccttgggtgaaatttctctttatatcttttgccagtcttctaattggatgatttgatttttttatgtagtgtttctatgttgaatttgagagttctttatatatttgttctagataggagtcctttgtcagatatgtggtttgcaaatattttctcttagtctgtaatttgtcttttcattctcttaactaggtcttttacagagcaaaaaaaaattaattttgatgaagttggattgatttttttagggatcatgcctttggtgtcatgtctaagaacacttcatcaagctctaagtctcacagattttctcctatgttatcttccagaggttttttgtttttattttattttactttttaattaagacagagtttcgctctgttgcccaggctggagtgcagtggcaggatctcagctcactgcaacctccgcctcccaggttcaagtgatcctcctgccttggcctcctgagtagctgggactacaggcacgcaccacccaactggctaattttttgcatttttatgtggttgctttcgagaattttctctgcctcttgtttttagaagtttgactatgatgtgtcttggcatgaatttctttgggtttatcctgtttgtgatgcgctcagcttcttgaatctgtagacatatgttgtgcgtgtgtgttgtcaaatgaagataatttgcagccattacttcttggaatatttttttaaggcccaccctccttttcctccccttctgggacttcaatgacaaaatgttagatcttcttttattatagttactcatgtccttgaggctttgttccattttctttcatctattttctttccattgttcagaatgggtaatttctattgttatacgttttgtttcactgcttctttcttctatactctccattctgctattgagcccatccattatggtttttatttcagctcttgtattttttagttgtattttttagttctaaagtttccatttggttcttctttatattttctatttctttgctgatactttttattattttatttgtttcaagcacatttataatttctcagtgaaacacttttatgatggctgctccaaaatctttgtcagataattctaacatctgtgtcgtcttgatgtttgtgtctgttaattatcttttgttattcagtttgagaatgcctgattcctagtatgacaagtgatttgccattgaagtcaggatattctgggcactgtgttataagattctggatcttctttaaatattttgttttagtgggcttccctttatactgctccagcgaaataaagtagggcactgcctgattgcttccagacagggataaaagtccaggttctccatccagcctttcctgaacctggggggttgggagagatgaggcctccatgttattgtttggtaagggtagaagttcaggttccccactaggaatccatgacaactccctggctgggagtgggagggatgcttcattactgctccctatgtggctttcactgacactgtgtgtggcagagagaggggggtgcttgttaccactgagtggtggcgaaagtcccaactctccaccaggccccctttgacactactccaatggggccgggtggaatgcctcatttctgcattggggtggcagtggatgtccaggctgcccacatggtttccaccaacaccacatcgggggagggtgatcccagtggggaggaatgtcccagctccaactctagcatcactctggctgagtatgggagtggcctagggttctttgttacagcctggtgaaggtgaatgtctaggttttccatccggcctttgctgacaagggtgatgatggaacttggatggagcggagcaggtatggactaaaagagctctgtctttctaggatgcccctttcctcgttctttggctagaaaagcatagttttgctagaacttgttctgttgggactttttcttgtttgtgccccttggcattttcagttgttggcttctccagtattcagcctgagatatatgaggcaaagagaaatcccagggaattcaccaccattccttaagtcccgaggttcctaaccagtctgcttctctccatctttcagtcttcttatgcttgtcttgtcacgttcaaggttttcagttatacttggcagaataaataaatacatctactccatctttccagaacatcactgctttttgttcattttatttatttattatttactgagacaaggtcttactttgttgcctgggctggagtgcagtggtgctatcatggctgactgaagccttgaactcccaggctcaagcgatcctcctgcctcagcctcccaagtagtttggaccacaggcatgggccaccatgcccagctacttttcattttttgcttttgttgactagccccacagagttttgctgtgttgttcaggttggtctcaaacttctggccttaagcaatcctcttgccttgctctcccaaagcgtattacaggcataagtcaccacacccagccctatcggtgcttttggaagaaggtgttcttccctctctctgtttccctccctatggccagctgcccatagagggcagtggtgctggagtgaagacctctcagcgcatccctcttcatctgtaggatgtgcatggcttccaatgctgtctgttctgctcctgagacactcgctggctacaggattataaaggtgatgaggtttcagcctaaagactctccattcaataacacttcctacaagatatcttttttgtttttttgagacaggatctggctctgtcacccaggctggagtgccacagcgcgatctgctcactgcaacctcagcctctcgggcttaagtgattctcctgccttagcctcctgagtagctgggaccacaggcgcccgccaccacacccagctaatttttggattttttttttttttttttttagtagagatggggttttaccatgttgcccaagctggtcttgaactcctgagctcaggcaatccacccgccttggccacccaaagcgctaggattacaggcatgagccaccatgcccagtcctacaagatatcttttctttttctttctttctttctttctttctttttttttttttgagacagagtctcactctgtcacccaggctggactgcagtggtgtgatctcttctcactgcagcctccgcctcctgggctcaagtgattctcctgcctcagccccctgagtagctgggactacaggcgcctgccaaaacacttagctaattttttgtatttttagtagagacggaatttcaccatgttcgccaggctggtctcgaattcctgacctcaagtgatccacccgcctcagcctcccaaagtgttgggattccaggcatgagccaccgcacccggccgagatatctttttcctcctcaatatctatgtgctcctccctcaacccttgggggcttcagtgtaggtggtcagattccccaccatttatgcctatgatgaaaagagtggaaatggtaataactggatggtgtcactaaactacaaatactttcaggtaggcctgtgcctttttcagcgggctgcagttctcctgcttggcttgagtcattcgcatttcctgagagctgggtagagggggagttgtggaggagcccattctgaaactgatctgatattgcaaacccatacacggaaaggaagaactgcccatacgtattcgagtcttccaatctgactccgagcccgcatccccctcaatcgtctcttttccccactccccagatcacggtgctgcttggtccccctcagagccatagagaagcagggggtgtggccatggaggggaaacctctgtcaccagagactttactgtacttctccttttgctctcagatgctgccagggtccctgaagagggaagacacgcggaaacaggtaaaaatcattttgcttttattttgcattcaacaagcaagttattacggaacagcagttatgggccaggcatacctcccagagctgggaacacagtggggacctccctggctctctcttaccggtgttacaacaggttgtagacagacccctgtcttgagcatcctccttgccaggcctgctgagtcttctgagagtagggtaggttattggatgcccaggagggaagaaggagccagggaggtcagccccaaggttctgcaaggccctcaacaggcctggactgaggaggtctggacagcatggccctgtcctgagcctctgtgcataataactgctgtccctaacctccaccccaccctcagccttccaattcccgggcctggggccctactcctgtgctccagagactcctggagctccttgaggcagcacacagtcctgctctggaggcgcccatctcccactcatgctgggatgctccagcccgtcccagagcaggttgtggctggagggtgctggcagaggagggacaatggcccggctcctggaggcaagtgttggctgcagggaacggagtctagtccttgccacagcccttgttaccccttaggtaaccttaaggggatttcaaagaactctggctctgcaaccctgctaagttttttatggaacatgtaaaatagatcccatggccaaagaagtatggacaatgtattatactatactctaatccccatgtctagagattaatggtgtagatagagtttactgaaaggtttttaaagtcctgcagtaaagaatcttacttaagccaggtgcggtggctcacgcctgtcatctcagcactttgggaggccaagttggggggatcacctgaggtcaggagtttgaaaccagcctggccaacatggtgaaaccccatctctactaaaacaaacaaacaaacaaacaaatcagacgggtgtggtggcacatgcctatagtcccagctactcaggaggctgaggcaggagaatcacttgaaccctggaggcagaggatgcagtgaactgagatcacaccactgcacttcagcctgggcgacagaagaatgagactctgtctcaaaagaaaaaaaaagaatcttacttaactcttttaccctgcctttctcaagtgtatgtgaccttgaagatgttttttgcatgtgacatgatgagtacctgcggggctgatgtcagctctgcctggggaatctgcctcagcttcagaccctgcaccccaaattcatgcttagcccaggccagacccccttcctgctgtcggcaagcagcttagctttccgcacacccatgaacagatacccagcagcctttggcatgagccatgtggcccgaggagataaacagacagagagaggaacattgatgcgtgtgaaatgttggcaggtgagtgggaggggcttgggttggtgctgagaccggagacacactctgctgtcacatccttcagggtccccgggggccagcacggagggccatgatcatgtaaattgggacttaaatttaactctatgtaaatataactctatgcagaggtcagggatggtagaggacaagctcactgcagagaaagaaagaaagatgggcaacagttgcagaacctaacccacagataggttttgtttgaccagctctgtacatttttagtttattttttatctttttgagacagggtcttgccctgtcgcccaggctggagtgcagttgcatgatctcggctcattccaacttctacttcccgggttcaagcaattctcctgcctcagcctcatgagtatctgggattacaggtgtacgccaccacgcctggctaattttttgcattttgagtaaagatggggttttgccatgttggccaggctggtcttgaactcctgacctcaagtgatctgcctgccttggcatcccaaagtattgggattacaggtgtgagccactgcgcctggctcacccatactttgttactggttttagaattcctttttacctggtctttcaaaccaagttttgaccatgtctgtccctgagtataatccttgatgagtagcaccagagagagctccacgttacccggggcctggcattcaaagcactcagtggtctggtgccactcaaagcctgtgagccaggcaggaagtttataaaattagagatggatgaatggatggatgggaaaaagcaagcaagggaggaaggaaggaagaaaggaaggagttctgggaagagagagaggctgcccccgcagggctctcagtttgaaggagaggtgcagcacactcagaaaaaactcccggccaggagtggtggctcacacctgtagtgccagcactttgggaggccaaggctggcagatcacctgagatcaggagttcaagaccagccaggccaacatggtgaaaccccatctctactgaaaatacaaaaatcagccaggcgtggtggcacctgcctttacccagctacttggggggctgaggccagagaaacgcttgagcctgggaagcagaggttgcagtgagcggagatcacaccactgcactctagcctgggagacagagcaagactctgtctcaaaaaaaaagaaagaactccgtgagcatcccaaatgccacatccccataatgcaaccagacccggtcctcccggatccaggggaagggtcggagctcagtgggtgagcaagaaaagccacgtggaagaagtaagcggccagatggctcaaagacaaactctcccctgctcaggcttgcacccagacacgacaccatgcatctcctcggcccctggctcctgctcctgggtaaggactgtggcctgggctagtactggggttctgggatgtcagtgggcactggaggaggaggaaagacccaggcagagaggcgtcaacatagggtagggtgggggcagcggtgtgtatagataaatgtacatacaaatatatatgtttcccatatatacatacacttctctcattgcatcctgctgtctttgtgtatctctgtatttctcccactatcttcagagggaattctttagtctttagaaagctctctgctgggtgcagtggctcatgcctgaaatctcagcactttgtgaggctgaggtgggaggatcacttgaggtcaggagttcaaggccagcttggacaacatagcaagacccctatctctaaaaagaataaaaaattaaacaaattttaaaataaaaaataacttttaaaagaaggctctcatgcccccttagtaatgctttctgatcactgtggtgagttctagaatacttggctttctctgactcaagtaaatgggtttttgagcaccctgaaaccctctacgcctgggagggggcctgcgtctggatcccctgcacctacagagccctagatggtgacctggaaagcttcatcctgttccacaatcctgagtataacaagaacacctcgaagtttgatgggacaagactctatgaaagcacaaaggatgggaaggttccttctgagcagaaaagggtgcaattcctgggagacaagaataagaactgcacactgagtatccacccggtgcacctcaatgacagtggtcagctggggctgaggatggagtccaagactgagaaatggatggaacgaatacacctcaatgtctctggtaaggccttcggggagcgggtcctctgctctgggcaggggtgagtgggaggcaggaaatacctgactcctggcacagagctcacaaaccgagcttcctgcagagctcaggcaggggacgccagcggatgacgatggcgatgcagcagcactagacagagctgcgggacctcggatgtcccatctgaccctcagttcctgcccctctgggacctggattccaaagttatcggatctcctgatctttccctctttctttctcaccatgtatttttcagcttttgtgacaaactcgtgtttggccttagtactggaaccatccaagcaccgcattcctttagtggggtgggtctgcatgtaaccagcctcagctctcccccaggctggaccgcccccttcagacattggggtctgaagctgcatcgctcaccccaaacttagggctgctcagagctccctatagaggaaactgggtgtggaacggagtaaccacactccctagggcagaggccccagacctgtgtttgatgggtcaaatccacccctacatgtgcagtgccataactgagcctgtgttataaaaatcataaaatgtttgttttactttttttcctcttcttttccccttccccttcctttccctttttatgagacagggtctcgcactgtcatcacccaggctggagtgcagtggcgcgatctcagctcactgcagccttgatctcccgggttcaagcaatcctcccacctccaaagtagctaggatcacaggtgcatgccaccatgcccagctaactttttaatttgttgtagaaatgggtcttgctatgttgccaggctggtcttgaactcctggcctcaagcaatcctcctgcttcaacctctcaaagcattaggattacaggcatgagtcaccgcacccggcctgatcttctgatttttcaagagacgatggaaatctagattttccagtgaaatctcccagcatgttaatgttcatggcaagttctcatgagctcttcaaggtcagatgacactgttgttgaaccccaaaggccaggtttgagctcccgatgcgtagtcagccaaacactgacacctcagtgcttagaagctgagataggattatttaatttagccaaagcaaggggacagaagagagaaactctcaaatctgacctgactttgagcgttagtgggggcttttatgagtaaagtaggtgtgcaggaggtgacctcccgatcgtcaaagctgttgtgcccctcggctcatcaaatttctggatgtcatcaaggaggtctgtgtgacctaaggatcattgttctttgaaagagagacaagttcatttatcttgcaggcagctgccagggagtcaggatgtaagttaaacaattatgagtgaattaatggttacctgctactgaaatgaccaaatgtaactaatcatgcatggaggaaggaaaggacaaagagaaaagaaaagaagtaaaacgaacatcttataatttttataacataggttcagttatagcactgcacatgtaggggtggctttgacccatcaaacacaggtgtggggggcccctgccacagggagtgtggtcactccgttccacaccgtttcccggatgggcagttctgagcagccttaaatttggggtgagcaatgcaacttcagaccccgctgtctgaaggaggtggtccagccttggggagagctgaggctgggtgcacacagacccactccactaaaggaatgcggtgcgtggatggctgcaatactgaaggaagccatgaaagtaacacaagtttgtcaaagctgaaaagtccgtgaactaaactgataaaattcacttagaggtggtgggaataggccgggcacggtggctcacgcctgtaatcccagaactttgggaggccgaggcaggcggatcacaaggtcaggagatcgagaccatcctgactaacacagtgaaaccctgtctctactaaaaatgcaaaaagttagccaggcgtggtggcaggcgcctgtagtcccagctactcaggaggctgaggcaggagaatggcgtgaacccggaaggtggagcttgcagtgagctgagatcacgccactacactccagtccgggcgacagagcgagactctgtctcaaaaaaaaaaaaaaaaaaaaaagaggtggtgaggtggtgggaatagaactttgcaatcattcagaaagcagacatccggcaatgagcatgaaagaaaagtagatcacagttcccaaggaggcttagtgtggtcaaggcctttcagaggggatttcgggtgagcaaaagtgattcaaagtggagaaaagcaggactgcgttgggtgcagtggttcccgcctgtaaccccagcactttgggaggctgagatcggaggatcgtttgagcccaggagtttgagaccagcctgggtaacatggcaagaccctgtctctacaaaatgtttaaaaaactagctaggtgtggtggcacatgcctgtagtcccagttactcagggggctgaggtgagaggattgcttgagcctaggaggttgaggctacagtgagctaggattgcgccactgcactccagcctgggtgacaaagcaagaccctgtctctaaagaaaaaaagaggccgggtgtggtggcttacacctgtaatcccagcactttgggaggccaaggcgggaggatcacttgaggtcaggagttcaagaccagcctggccaacatggcgaaaccctgtctctactagaaatacagaaaaattagctgggtgtggtggtgggcacctgtaatcccagctactcgggaggctgaggcaggaggatcacttgaactggggaggtagaggttacagcgagccaagatcgcgccactgcactccagcctgggtgacagagggaaactccatctcaaaaaaacaacaacacaacaacaacaacaataacaacaaaaaaacaaagcaggactggagagaggtggaatgaagtggcaaggggttcctgaggggtgatttgggacaggacatctaaagccaggtgtacgctcacgtcctcagtcccccaggctcctgcacgggctctgttcttttgcagaaaggccttttccacctcatatccagctccctccagaaattcaagagtcccaggaagtcactctgacctgcttgctgaatttctcctgctatgggtatccgatccaattgcagtggctcctagagggggttccaatgaggcaggctgctgtcacctcgacctccttgaccatcaagtctgtcttcacccggagcgagctcaagttctccccacagtggagtcaccatgggaagattgtgacctgccagcttcaggatgcagatgggaagttcctctccaatgacacggtgcagctgaacgtgaagcgtgagtctccccggcatgcctgtgggaagggcaaggtctgtgtcaccttctccccagccccgcagggggcatgcacccagggcagggggaagcctgcacagacggcggcatcctccagccctggtcacgccgccttgtcagccctggtgtttcgggaaaaagatttgctctagcctaacagaataaaatggtccatcctcaagccatgacatgaattggggattatctggttaggtctttttgttcccctcttggtggggatttttttcgcatcattatcttgtgcctcattcattcaataaatacgtatcatgaacctactaggtaccaggccttattacggctgccaatggggggcatggggcggtgggcagggtgcagcagtgagcaaaactcttgccccacgcggagccagcgctgcagtgaaagagacagacaacaaatggattaccaaagaaatacagagcatgagccaagacattagaatctggaacaaagcaatgttaacaaagaaatatacaacactattgtaggtagtgatatgtgtgttaggaaaaaaataaggccgagagaggggagtgatggagagagacctctctaagaaggtgagcacttaggccgggtgcggtggctcacgcctgtaatcctagcactttggaaggccgaggcggggggatcacaaggtcaggagatcgagaccatcctggctaacatggtgaaaccccatctctagtaaaaatacaaaaaattagccaggcatgatggcaggcgcctgtagtcccagctacttgggaggccaaggcaggagaatgacatgaacccaggaggcggagcttgcagtgagctgagatcgcaccactgcactccaacctgggtgacgagtgagactccatctcaaaaaaagaaaaaaaaagaaggtgagcacttaagctgactggaacggagggagtggctgaggccggcacatatttgggagaggaggatttcagggaaagagaagggcaggttcaaagctttgaggcagcagctgggtgggaggacctcagaggctgaagttcaccgcctctgagggccacatggtaggacaggaggcaggagatggagcaggactctggatcccgagggctgaggtgagggtttgggattctatgcaaagcacagaacccgctcgtggtttccagcaggattggcgaggtctggtagatggtgttaggaaccctgcgtgctgctggtggagaccaagaagtagaggaagtgggagggggaagctgagagccgagttaggaggctgtgaccatcacctgggtgaagggactggcaggccatggctttgtcagaataaaagcactttccacaccctccaccctctgaggattccccgccccctccccgactgcccctctgctcctccagacaccccgaagttggagatcaaggtcactcccagtgatgccatagtgagggagggggactctgtgaccatgacctgcgaggtcagcagcagcaacccggagtacacgacggtatcctggctcaaggatgggacctcgctgaagaagcagaatacattcacgctaaacctgcgcgaagtgaccaaggaccagagtgggaagtactgctgtcaggtctccaatgacgtgggcccgggaaggtcggaagaagtgttcctgcaagtgcagtgtgagcccctcggagctggggacaggccaggcagggaggtagcaggggtggacccggagaggggagccacgggggctctcggggccgtgtgcacaggttgggggtgctctcctcacccctccactcgcctctgccccctcttccagatgccccggaaccttccacggttcagatcctccactcaccggctgtggagggaagtcaagtcgagtttctttgcatgtcactggccaatcctcttccaacaaattacacgtggtaccacaatgggaaagaaatgcagggaaggacagaggagaaagtccacatcccaaagatcctcccctggcacgctgggacttattcctgtgtggcagaaaacattcttggtactggacagaggggcccgggagctgagctggatgtccagtgtgagtagccacggagcctctggttctagggagagaagatggacacagggaacggggaaggcagatggggtgcagggcattccggggtcctggagtcaagagcaaggagcagccagggtctcctgttcacaactgctgtctcagctcctagcatagggcctggctcatggagggtgcttggtagatgcttgtttttttgtgttttagttttttttgagatggagtctccctctgtctcccaggctggagtgcagtggcacaatctcggctcactgcaagctccaccttcccgggttcatgccattctcctgtctcagcctcctgagtagctgggatgacaggcgcccgccaccacgcccggctaattatttgtacttttagtagagacggggtttcaccgtgttagccaggatggtctcgatctcctgacctcgtgatccacccgcctcggcctcccaaagtgctgggattagaggcgtgagccaccgcacccggcctgtagatgcttgttgaatgaatgaggccaggtgcggtggctcccgcctgcaatcccagctctttaggaggctgaggcaggagggtctcttgaacccaggagtttgaaaccagcctgggccacacagcgagataccatctctacaaaaaaatacaaaaattagctgagcatggtggtgcgtgcctgtggtcccagctactggggaggctgaggagggagaatcacttgagcccaggaagtgaaggctgcagactgaactatgttcctgctactgcactctagcctgggtgacagagcaagacctgggtctcaaaaagaaaaagaaaatgctgggactgggattataggtgtgagctgggcacagtggctcacacttgtaatcccagcactttgggaggccaaggtaggcagctcacttgaggccacgagttcaagcccagcctgggcaacatggtaaaaccccatctctacaaaaaaaaattagcctggcatggtcatgcatgcctgtagtctcagctacccaggaggctgaggtgggaggatcacctgagcctggaagtagaggctgcagtgagcctgtgatcatgccgctgcactccagcctgggtgactgagtgagaccttgtctcaaaaaaaagaatggattggccaggcatggtggcttacgcctgtaatcccagcactttgggaggccaaggtgggcagatcacctgaggtcaggagttcgagaccagcctggccaacatggcgaaaccctgtctctactaaaaatacaaaaaattagccgggcatggtggcaggcacctgaaatccacctacctgggaggctgaggcaggagaatcgcttgaacccaggaggcagaggttgcaatgagctgagatcatgtcactgcactctagcctgggtagagtgagattctgtctccaaaaaaaaagaataattaactgcaagataccaggactccatgagggacacagagacttagcgtccctaggcagtggctgagtcttgagagatcttgaaatttttaatgagaactggggcaaactgtctcattacctctccattgtaagacccttttaacacagtgaatcttgttaccatgtagagcacaggacaaaaagaacacataagctcgatccttggaccctgagatgtcatatgtgctaacaggacaggggtgcccaaatcctgagcatctcagacagctggatgcgtgaccacagcagccacagtgatgtttgtggagtgtttgccacacgccacactctgctctaagggagtcatctcatttccttcttgaaacaattcccaggaggttaggaactctcaggactcaccccccacccaccccgcactgcctcttgtttttaagatggagtctccctctgttgcccaggctggagtgcagtggcttgatctcggctcactgcaacctccacctcccgggttcaagcgattctcttgcctcgaccacctgagtagctgggactacagacatgcaccagcatgcatagctaatttttaaaatttttagtagagacagggttttgctgtgttggccaggtctcgaactcctgacctcaggtgatctgcccacctcagcctcccaaagtgctgaaattacaagcgtgagccaccatgcccggcctcaggaccccatttgacagacgtgtaaactgagacctgcagcccatgcccgtgcgcctctcagcagccgtctggcttcagcgctgtgccctgaacccctgcaccaaaccacagccaggccagagagccagggcagggtttctgttctcacacagatgcaggaaggacgcacaagcccccctttgattaatttaggacctgtgcagatgcccgggacaggtagcgggagaagaggaagcaggagggaaggggtactgtggacagctggcttttctttactcacctctctggttttcttccagatcctcccaagaaggtgaccacagtgattcaaaaccccatgccgattcgagaaggagacacagtgaccctttcctgtaactacaattccagtaaccccagtgttacccggtatgaatggaaaccccatggcgcctgggaggagccatcgcttggggtgctgaagatccaaaacgttggctgggacaacacaaccatcgcctgcgcagcttgtaatagttggtgctcgtgggcctcccctgtcgccctgaatgtccagtgtgagtccctgggctaggcagggggatctgggaggtggcccggctgggatgaggggatgaaggcaacgaggccggagcctgggccagtgtcttcaacagaattgagggacaggagcctggcgtcagggccaaggggaggggaggcctggggacagcaaaagggacagggagcggagaggtcagcttgggacccttgccctccagatgccccccgagacgtgagggtccggaaaatcaagcccctttccgagattcactctggaaactcggtcagcctccaatgtgacttctcaagcagccaccccaaagaagtccagttcttctgggagaaaaatggcaggcttctggggaaagaaagccagctgaattttgactccatctccccagaagatgctgggagttacagctgctgggtgaacaactccataggacagacagcgtccaaggcctggacacttgaagtgctgtgtgagtgagggccggaggctgggagtggagcagagaagggaccagtggcctgcctggtagtgacttcgcaccccctccccctgcccgccatgcagatgcacccaggaggctgcgtgtgtccatgagcccgggggaccaagtgatggaggggaagagtgcaaccctgacctgtgagagcgacgccaaccctcccgtctcccactacacctggtttgactggaataaccaaagcctcccctaccacagccagaagctgagattggagccggtgaaggtccagcactcgggtgcctactggtgccaggggaccaacagtgtgggcaagggccgttcgcctctcagcaccctcaccgtctactgtaaggcctcttcctgctcttgttcttcttggtggtggtcagtccttccttccttccttccttccttccttccttccttccttccttcctttctttctctctttcttttcctcctcctcttcttcccctcctcctcctcttcctccttcttcttcttcttctgctttctccctctcctcctcctctttcttctccttctccttccttcttcttcttcttatagagacaaggtcttactctgtcacccaggctggagtgcagtcgcataatgacacctcactgcagcctccaattcctgggctcaagcaatcctttcgcctcagcctcctgagtagctgggactatagacatgcaccaccacatccggctaatttttacatttttgtagagatggggtcttactatgttgaccaggctggtttcaaactcctgacctcaagtgacccttctgcctcagcttcccaaagccctgggattagagccatgagccactgtgcctctccctgtttcctctcatgctcctctctggccctgtctcctccagtgacttcccgaaaagccttccagaccagctggccccttcttccccacctcactgtcccctttcccattcacaccccttgctccaggccatctgccgctgtgctggaggagtcgtcttgtcctgcgtcaccagtctctctttttctacctcccctgcagtctctcctgcctccctctagggtcccctctcaggctgctccaccttccagaagtcctgagctcctactgggtccctgtctctctctctctgactactctgtctctctcagccctgacaggctccttgtttttatcttttaaaacgtaaatgattttttttttaaacggagtctcgatctgtcacccaggctggagtgcagtggcgtgatcacggctcactgcaagctctgcctcccgggttcacgccattctcctgcctcagctccccgagtagctgggactacaggcgcctgccaccatgcccggctaattttttgtatttttagtagagatgtggt[134 bp omitted]cacaggttggagtgcagtggcacaatctcagctcctgcagcctcgaccccctaggctcaagtgatactcctgcctcggcctccacagtagtaaacttgagtggtttttaaacagatcatacaagcacctggtaaaaaaataaaatgtaagcatgaaagggtaaatagtggaaagacagacgcggctcactcttgatccctgagaactctcatccccaccaaaggtcctcactgcacacagtcttcccatctcactgcacacagtcttcccatctcctccaggggtatttttcacacgcacaattcacacacagaggtctgtgcctatatacccttcctcatgacacagacgaggcagagcccacactttgcctgggaattttctttgcttttttccatgtaataatactgtttggacattgttctgtatctatgcatacacagagtgtctaaagtctggaggctgggcatggtggttcatgcctgtaatcccaacactttgagaggccatggtgggaggatcacttgagcccaggagtttgagaccagcctgggcaacatagcccacacctcatagcaggatctcatctctacaaaaaataccaaaaaaaattttaaaaacgaacaaacaaaacaataacaacaacaaaaaagagtctgaaagcatatggaagatacctaattaatttattgtactttttcag[136 bp omitted]cttgaggccaggagttccagaccagcctggccaatggtgaaaccccatctctactaaaaatacaaaaattagctgggtgtggtggcgcgcacctgtagtcccaactactcgggaggctgaggcaggagaatcgcttgaacccgggaggcagaggttgcagtgagccaagatctcaccactgcactccagcctgggtgaaagagcgagactctgtctcaatcaatcaatcagtcaatctagggaaccatcaccagcacggccgaaggccaaaggaaaacatctgaaacatgttatctggaaatgtaacagacacatcccatcatataaaaccattgttccctgggtatcccctttgcagacagcctgagagcctcctctttttcctggggccatggagtcctcgcgtatgaaggttgcatacatcctcctcccagtgccctcttcagggcctaggtctgcagcctcttgttttgggcacgcctgcaaggacagttgcaagatgcattcccatgtggaattgctgggtggaagacaggtgcactttcagagctgatcacacagctatactgccgtgaagagctgcacccatttatgcgggtgcgggtcacaggctctgggcgtgccacgtctgtgggaaaagcagctcctcaggagaattagtgccttattcctaaagggaggcccagagcaagcaggggccgttgtcaccctcttcctctgcacccctgcacgcatgcaggggagaaggacgagtctggctgcagagagaagtccaggatgccttccaggcaaaggctgccagggagagctggcccctcagttgattaaggtctctcctttctccacccagatagcccggagaccatcggcaggcgagtggctgtgggactcgggtcctgcctcgccatcctcatcctggcaatctgtgggctcaagctccagcgacggtgagctcctgccatcccccaccacctcctctatcccttggcagaggcccgtgtccagttgctccatctcgaagcctccagcctgtggagtccctgaccctcacacatgtgcctttatttctcagttggaagaggacacagagccagcaggggcttcaggagaattccagcggccagagc[131 bp omitted]gtgaaaccctgtctctacaaaaaatattttaaaaattagccgggcgtgatggtccatgcctgtaattccagctactcgggaggctgaggcaggagaatcgcttgaacctgggaggcagaggttgcagtgagccaagattgcgccattgcactccagcctgggtgacatactgagactctgcctcaaaaaaaaaaaaaaaaaaaaaaaaagggtaggcatgaggcagactgtgaagctgagtggggaaacaaggtgaaggaaggggataaaatgtcctctgaggagacctgggctgtcagaggccagggaaggggacgagggttggggaacaggtggttagcacttcatcctcgtctccctcccaggttagaagggcccccctctctgaaggcccccactccctgggatgctacaatccaatgatggaagatggcattagctacaccaccctgcgctttcccgagatgaacataccacgaactgggtactgagggtaccaggagggtgaccctgcaccctgggagggaggcgggaggaaaagctctgtcccgcctgccctctttgtgccaggcccatgccaggcaccctgatacatgctctgcctcattcccactcggcaacaagcctctgggtaagggccagtctccagaagtggacctgctccttcaagtcagcagcacacatgcccagtccgttcttatcacaaagatcaagacctcatgatacacacccacgcctactccctccacgcacatttgcacgagctcctactgtgagctttgggcactggggaggccacaggttttacataaggggctgaggttggggtgctgttgggggctctgggtgttgagagggaggagagttcgtgggagatgcttcatgcgtggtcgtctatctgccctgtctctcagagatgcagagtcctcagagatgcagagacctcccccggactgcgatgacacggtcacttattcagcattgcacaagcgccaagtggtaaggagggtctccccaggtctccccagaggggctgtggaaggctggggacagggcctggcctcagtggtgggtcccacataggaaggagttgggtaggcatccgtggtggcagaggttgggtgttggagacggttgctccggcagagctggccagagccaggcaggtacctccaggtcctggatgccggccacagccagtttcctgacacgaggacacccgcctgggcttttggacccccgggtggaatgaaggagagaatgcggagaaaagcggcggtggaggctggcgacagtggggccaggctaaccaccatgcggttttctcagggcgactatgagaacgtcattccagattttccagaagatgaggggattcattactcagagctgatccagtttggggtcggggagcggcctcaggcacaagaaaatgtggactatgtgatcctcaaacattgacactggatgggctgcagcagaggcactgggggcagcgggggccagggaagtccccgagtttccccagacaccgccacatggcttcctcctgcgcgcatgtgcgcacacacacacacacacgcacacacacacacacacactcactgcggagaaccttgtgcctggctcagagccagtctttttggtgagggtaaccccaaacctccaaaactcctgcccctgttctcttccactctccttgctacccagaaatccatctaaatacctgccctgacatgcacacctccccctgcccccaccacggccactggccatctccacccccagctgcttgtgtccctcctgggatctgctcgtcatcatttttccttcccttctccatctctctggccctctacccctgatctgacatccccactcacgaatattatgcccagtttctgcctctgagggaaagcccagaaaaggacagaaacgaagtagaaaggggcccagtcctggcctggcttctcctttggaagtgaggcattgcacggggagacgtacgtatcagcggccccttgactctggggactccgggtttgagatggacacactggtgtggattaacctgccagggagacagagctcacaataaaaatggctcagatgccacttcaaagaaccagtgaactcttttcagtctgtggagtcagagtggggatgaggagaggggaaagtcttcatggggcctggggggaaggaaatggagtcacagtggtttactgatcaaaccagcagattagagagtctggtgtcttgttaggaaaagcatactggctttgcagacagacaaacatgagaacttgaatcttgattcttcggcttaactagcccggtgatcttggcagggctcgccagcttgcctgagtctcggcttctccatctgtaaagtggagagggaaaggccactgcctaccacgcaggtggcccacgataggaagtgaggcatcgtcttctatatgctggagccacattgagacccagcacagaagccgaaagtcccccagaaaaccaacctccatcctttatttgcatttttcgaagaatgtgaaaaggggaagccgattcaaaacagctcttcccaaaagtgacgctacccaattcttgcacaacccatagctgccagagaaagtcttgaagaccagccaccctgagaaacctcacagcttttctgtcattcgaggtcctctgcacccgttctctaattctgttcactgattcagactttccagttaggtgccccagctcccctctccgcttctcgggtttgatctttctccacccattcacctgcttctgcaaaggggctaaagcccattctccttagagggcaggggtgtaattatctgatcatcagggagattggctcctggcacgtggcaggtgtccccaaactgccaccttcctctcccaccttcctttccctcccatctctgctcagtacccggacggtaactctaggaattatggttcagggaggccttgatcgccccatcaatccactttgtccctggtttgattcttgtgagcaccattaacttttctggaggaaggtgaggctttaagaactgtttaaagcccaggcgtggtggatcacgcctgtaatcacagcactctgggaggccaaggtgggcagatcacctgaggtcaggagttcaagaccagcctagccaacatggtaaaatcctgtctctaccaaaaatacaaaaattagctgagcgtggtgattcacacctgtaatctcagctacttgggaggctgaggcaggagagtcgcttgaacctgggaggcggaggtagcggtgagccgagatcacgccactgcactccagcctatgcaacagagtgagactccgcctcaaaacaacaacaacaaaaactgtttaaatgagacaggagggtgttggggtgtctgtgcccaaaatggggtctggtgtcattcaactctttcttcattcattctgcacacagatactgagcacctggaaatgcacccagtacagagccagttgttaggacaccaaaaagataaggcgtaggaccaaccttggggatctctagtcgagagccgccaagggtttttaaggcaagataccctggagggagctgaggcagtcctaagcctgaagggcctggcttaagctccctggcaaccatcgagcatcttccccttcccaccctgtccctcagcacagctgctgacataaacctactacatggctgattgaccatgagatatggccatcaatagacattgctgaggcgtgaagagcaggtgaagagcaggtggccaggaagctagggggccaggactccagacgcaggccgccctccacaaccccagctctcacagtcctcccagggtccagacaatggatcgtgcatttaggttcccaaacacctgctgtgcaacgtgtagtagacaaagcagaccaaagcctttgccctcaggaggccggcattctagctcaggagccagccaagacgatgtcgcactgaagaaagacaacaaaagtgagattcacaggagggatgagtgtggctgaggcacccgggaaggccctcggagaaggtgaccttgggcaaagatccagacgccaggtgggtggggccaaagcagagaagatctggaaaacccaatggctccccagggcttcgctcttgctgcaggaggggaaaccacactgctgtggattcttcctccattctgtccatttctcagttcccaacaacacactgaacagtaggaggccagttctccgctcacagcgggcgctgcaccccaggtgctgctctcgagaaaaaggcgagcatggaccaatttagtggctccgaggtatgaaaagcagtgagatggtgtctttgagggagttagtgataggctgagacccccttgctgtcccccctgaagcctggtgaccagagctgccaggaggccacacagagagaggtttatgatgggggacctggaattcggaaggggcagagtggtcaggtgacccatacacgcctgagaaaactgatgtggagagctgtgttgtcattctgaggcaggaaatagagacagactgacagacagacagaaagacacgggcacattgagagacagagacagaatcacagagcagagctggcttctcaccagcaggcgtgggcacacctgagagagcatccagagaggttagaaatcttccttaggtcctcctgggaggctcaggtgaccccagtgggaaacatgaaaggctgggaggacttccagggctgagagaaggaagctacgcagccggccggtgccacattccctgtgccttggggagtgtcccccagtgtccccagccatgcaccctggggggagtcggcttggacatctgtgccaccccttgacaggcagagtgggggccacaacctgggccctccagtgctggtcagcagaggctgcccccgccccttgccttcctcctcccgctccttcctccagccctgggaaggtcggaagccaccaccatggggctagtgcggaagcagagggagaacagaggggccctcctcgcaaaaactaaaacaagcccacagcctgtgcagaaccgcacccgggtgtgatcactccttaccccacacacccactgccacttggagatggcttcatggctgcagtcacagggcaccctgtgttgtcaggggtgagccagtgaggcccgggacctgcccaggggtgcatcaagggtggagaagacctggccccagcgcaggtgtgaacaggcaggagggctggggagggaatagcgctgggttgtggccgagcccccaagccctgctcttgagaggcactggctacacactcggcccctacccagacaggaccccaattcctccctggcccctctgtgttcctgcatcttcccagcccctcacctcctctggcgtggcctcacctccagccgggatgccccattagctgctcacccaagctgctagaacctcaggctaatggccctgtcacccgccctcctccccttccggctcactgcccatcccgggcatcctccatcagcccgctgaggggactgctgagcctcagagacatctggcagcaccaggaggtgggtccctctctctgtggctcctctcttcacctgactgttccccagacccccagaccccctgcccaggtggcccctgagaactgctaagctcaaccgtgacatggatggggcctggctgacccttgggctctccctgggggacccccttttcctgtccctggccacaccctcaccttatccacacccttctcctccctgctgccccgccggctttccaatgtgggtggggggtgggggcagctcctgccttgccagggaaccagggagggcagtgggctcaggagtcaaactcccattcccagggaaggctcaggctgtgggcccagccctgttctgaattctctccacccctcctccccacagagtctcagaaatcgagaagctttcttcctctgggacctgtgcgccacatcctatctcctgtgacgctgcaggagcttccctggttttaagaggtgacatggtggagagaaagcacaggactgggggccacaggtcctggcttctcatccaggctccgctgctccctgactgctgcctttctctgtgggcctcgtttcctccctgatcccaccaggtgaattgtaattctccacacagggctggaacccgcgagtgatcccaggagcccctcctctccggggccccaagatctgaggacagggagccaggttgcacacaggagccgtgcaggccaggacggcggccccatggacctgcccccgcagctctccttcggcctctatgtggccgcctttgcgctgggcttcccgctcaacgtcctggccatccgaggcgcgacggcccacgcccggctccgtctcacccctagcctggtctacgccctgaacctgggctgctccgacctgctgctgacagtctctctgcccctgaaggcggtggaggcgctagcctccggggcctggcctctgccggcctcgctgtgccccgtcttcgcggtggcccacttcttcccactctatgccggcgggggcttcctggccgccctgagtgcaggccgctacctgggagcagccttccccttgggctaccaagccttccggaggccgtgctattcctggggggtgtgcgcggccatctgggccctcgtcctgtgtcacctgggtctggtctttgggttggaggctccaggaggctggctggaccacagcaacacctccctgggcatcaacacaccggtcaacggctctccggtctgcctggaggcctgggacccggcctctgccggcccggcccgcttcagcctctctctcctgctcttttttctgcccttggccatcacagccttctgctacgtgggctgcctccgggcactggcccgctccggcctgacgcacaggcggaagctgcgggccgcctgggtggccggcggggccctcctcacgctgctgctctgcgtaggaccctacaacgcctccaacgtggccagcttcctgtaccccaatctaggaggctcctggcggaagctggggctcatcacgggtgcctggagtgtggtgcttaatccgctggtgaccggttacttgggaaggggtcctggcctgaagacagtgtgtgcggcaagaacgcaagggggcaagtcccagaagtaacgccactgctcgggggaaggagcatggggcaggagggcccggctgcttctccaggcccctgcggggggctgcttcggaggaactgcagggcagcctggcccggaggcctccctggagccactcaagcagagagcggcgcctgctgagggcagcaccccagtcaagagaggagcaccgagccagagcacggtggcagggggaggtaagtttgcccctgcacgtgtcgaggaagtttgtcccttcctcgcctatctttctctcccctctgcacgtcctcacctgcctgtcttccgtgggccgcgagcagaggccttgtacttacgggaaggaggaggcagtctgtttctgacccacaggaactgccactccggtgatgcacttgaggacagctactctgaaatcagttcccaggagagaacatttgatttccgagtaggagaggaggcaggaggcaggataatgacgctgttataccatgtgaaactcgcaagggggcagccttggagcttggaacggaggctggcaggaaaagatgcttcagccggggagggaaaatgcaaggtcccgcagtgatgggcaaaggctacggagttgactcttgaacaacgtggggatggggtgccgaaccccacgcagtggaaaatctgtgcatgactttgactcccccaaagttcaactactaatagcctactgttgaccaaaagctttacccagtatataaacaattgagtaagacatatttgaagccaggcacagtggcttatgcctgtaatcccagcactttaggaggccgaggcgggaagactgctcgaagccaggagttcaagagcagcctgggcaagatagtgagacccccacctctacaaataataaaaataaaaataattagctgggcgtggtggtgcgtgcctgtagtcccagctactcaggggtctgaggtgggaggatcccttgagcccaggattgaggctgcaatgccatgatcgcaccactgcactccagcctgggtgacagagcaagatcctgtctctggaaaaaaaagaaaaaagacatattttgtatgttatatatattatgtgctgtattcttacaataaagtaagctagagaaaagtacatgttactgaaaacattattagaaagagaaaataccttcacagcactgtgctgtatttatcaatactgtaagttttgttgtctgtttataagagaagttgtctgtctcaagcggcagtaaccgcggctgcagatctcaatctgtggtagatatcaagcagttcaacccttttttataatgtcatgacttttctttgcttcttggaagcagctctggcatcactagtggccccgcatttggggccaagggggttattcaaagtttacggtattgcattaaacatggtgaaacatatgcaatgactatgaaagatcactttttacttctgtacacagtgtactggcgagaactgctcaccaggaggtgattagcttcacgtggtgttggaagcagatactcaacagttgagctcacggagaaagcacaggaggtggctacgaaattattataggagtacagtatgtctacagtaaatatgcacttatgactttaatactgcacatctttatgtttgcttgcatttctcttgacttcaaatggcatcaaatagagtttgtgtttgcgtgcatatatttttgataaattttaacttttttgttttgttttgtttttagacagagtcttgctctgtctcccaggctggagtgcaatggtgtgatcttggctcactgcaacctccgcctcccaggttcaagcaattctcctgcctcagcctcccaagtggctgggattacaggcacctaccaccacacctggctaattttttgtattgtaagtagagatggggtttcaccatg[131 bp omitted]gggcaacatggagaaaccctgtctttaccaaaaatacaaaaaatttagctgggcatggtggcgtgtgcctgtagtcccaggtacttgggaggctgaggtggaaggatggtttcagcctgggacgcagaggttgcagtgagccgagatcatgtcattgcactccagcctgggtaatagagccagatcctgtctcaaaaaaaaaaaaaaaaaaagctttgtatccattttggcatacatagactagtatgtatggcagtaaatagactagtggcagtaaatagactagtacctacatatattttttgtattcgtggcatacttaacttttgcttaattttaaaaatatatttctaggcttgtagttcctctgtaagttttttcaaattgttgcaaatctctgaaaatgtttccaatgtatttattgaaaaaaatccacaagtaagtggacctgcacagttcaaacctgtgctattcaaaggtcaactatatagtctgtaatacgtgatgggtgtcacgctgagtgtctacagtgagtgttgtctcacttcagcttcacacaacgctgtggtttagccttgccactgccgtacggatgagcgggtgttcactacacgaaggtactgggcagaggagcaaacactgactaaattctagcctgtgctttgctcaacaagccacatgcctgccttgcttgcatcaagggaaggagtattgtgttctaatttgaagaaatacaccagccactccttaggcagcacttggtgcgggatgggctcctctggaaagggagcacctaatttgcacaaaggtgctgcaccaggtagctacgatcctggaatgggatgaagaaacttgcctaaggccctacagcaaggaaggggtaaaagcaggatgtgatccttccaagcagaacccccaagagccaggggacatttgggaaacctgggggtgtgggggttaaccctgtatttgtggtccatttcgcaaaggatagcatcccacatccatgagagggaggtcagaagggagtggctgtggctgtgaaggagacagacacctgggcacctgctctaaattacagcaatgccatgcacatgatgatgtattggagcacaacaaatggcagccaccagctggggtgcacgcaccaatttctacaaatgagctctgttcaggctgaaatgtctacgcatgcaaggatttttcttgtaattgatgatatatccccagcgcccagaagacagagtggcacgcagtaggtgctcagtaaatgttcgctcaatgaatgaatgaatgcctctactagccttccaaagaaagttctatgtctgttttatcaatatggaaacaggccagagaaattaagtaacttcttttggaagccagaaacaagcccggcacttgtgcagtgacaacaccagggaatttcagtaaaaacccaaactccaccccagggagccccagtgcctcctcccgcatcacagggtgccagggcccactctctttgactcctgctccatagcccctgctgggtactgggctgcttctcccagttcctcctgcctccccccacttagggcaaatccagtgcctccctggggcccaggagactcagtgtgatccaccccaggcgcctctcactcctgtgagacccaaacctcctatcagctcccccagcaggccaagtctgtgcacccgtgactcccctgccccaatgttccctccagtggctctttgcctcttcagtatccacgtcttcatgatccttcccctactccatcccccaagccctcaccaccaaatgtaatgtaaacagcatgacagcaaaaactttttgttcacaactgcgtgttgttttttttttttttttttttttttagacacagtctcactctgttgctcaggatggagtgcagtgacacagtcatggctcactgcagccttgaattcctgggctcaagcgattcttccatttcagcttcccaagtagctgggaccagaggcacatgccactaaacccagctaatttcttttttctttctctcttttttttttttttttcccctgtggacatagggtctcctcatgttgcccaggctagtctcaaacaacctgtgctcaagcaatcctcccacctcagcctgccaaagtgctaaaattacggacctgagccaccgtacccagcctactgctgcacttttaacagcttaattgagatattatgtacatatcatcaaattcaccaatgttaagtgtacaattcaatgatttttagtaaatttactgaggtgtgagtccattaccatcagctagttttagaacattttcatgaccctagtaaaggattttacttcatgttcatttaaacttaatcttgggccaggcggggtggctcacgcctataatctcagcattttgggaggctggggtggacggatcacctgaggtcagtagttcgagaccagcctggccaacatggcgaaacctcatctctactaaacatacaaaaattagccaggcgtggtggcgggcacctgtaatcctagctacttaggaagctgaggcatgagaatttcttgaacccgggaggcagagtttgcagtgagccaagattgcaccattgcactccagcctgggcgacaacaagaccctgtctcaaaaaaaaaaaaaaaaaaaaaaaaacaacttaatcttcatttctacctccatcccccagacaaccacgagtctactttctgactctataactttgcctattctggacatatcatataaataaatgaaatctgacaatatatgtacatggtcttttacgtctggcttgtttcactcaacataaggctgtagtgtgtatgggtagctcattccttttctttgccaaatagaattccagtatatggatgtgccacttttttattcactcaccagctgatgggctgccaggtaacatttccactgttggtgactatgaccaacactgctgtgaacatttaggactgagtctttaagtagacctgagtttccacttctcttaagtaaatacctacggtggaattgttggatcgcatggtgaatttatgtttaactttttaagcaactgccacctgctttccaaagcagggacaccacctcccattattctcaccagcagtgaatgaggcccctatctctctacattctcgccgaccataggcattgtctgactttttgcttgtggccattctagtggatgtgaaatcatatctcattgtgccctgtgattgtttgaatgaactaatagatcacctgtgaaactggacagcacttgggtttgaaccctagtggtgacatttcacaagctgtatcacctggagcaagtcacttccctacggtgaaggacaaggattttatgacataaaagcgttgccctagaagcagtgtctgctatggattatgtgcccatgaaaaggcagctgctgtcatcatcgccaccaccattattattgttattattattacattgtcaccccagagataatcctgcaccagtgacagggaaaatagcagctggcatccgctgcctgctcacgaccacacgccaggcttccgtcaaaccactcaacatgtattagtaatcttttaatcgacctacatattgttttaatttgcatgtgttaatgcgttgatctatgagatgggtattatgatgagctctgttctgcaggggagaaagcagaaacatggagaatttaagtcatttcccccaaatcacaaagtcaggaagaaacagacctcacggagctcgctctctgtcattgcatcacacttcctgcccttacaaggcaaattggataaatgccattctagagaagcagacaaaattcaagtgaagaaggggagaggaagacgtcggctggggcctgcttagagcatcccagctgagactgcatgaggagggaggcacgcagttgtggaatttgttccccttttagcatgctgaccagccctggcaacggagctcaaggcatctatgtgccactgctcaacagtgagtgacgtcatgggcacggccaggtctttatcagttctgccggataaatagccaactgcactaggtctggagagacagcaaggtgctgtgcggcagagcatttggggtctcaaagaagcaggtgagcctgggcccgaggggctgggtggaggagcaccttggtgcttctctgctggggaagggacaggggacagggcatgctcaggaagacaggcaggctgaccccgcctggaaggcacccagagacaagaggggtgggcgtagtgacctcgtgcccttttaggggagatgctgctggccagaggccgttagggcccccactaccaactccatgttactctctctcaccagtggccaccaccatggatacaggccccgaccagtcctacttctccggcaatcactggttcgtcttctcggtgtaccttctcactttcctggtggggctccccctcaacctgctggccctggtggtcttcgtgggcaagctgcagcgccgcccggtggccgtggacgtgctcctgctcaacctgaccgcctcggacctgctcctgctgctgttcctgcctttccgcatggtggaggcagccaatggcatgcactggcccctgcccttcatcctctgcccactctctggattcatcttcttcaccaccatctatctcaccgccctcttcctggcagctgtgagcattgaacgcttcctgagtgtggcccacccactgtggtacaagacccggccgaggctggggcaggcaggtctggtgagtgtggcctgctggctgttggcctctgctcactgcagcgtggtctacgtcatagaattctcaggggacatctcccacagccagggcaccaatgggacctgctacctggagttccggaaggaccagctagccatcctcctgcccgtgcggctggagatggctgtggtcctctttgtggtcccgctgatcatcaccagctactgctacagccgcctggtgtggatcctcggcagagggggcagccaccgccggcagaggagggtggcggggctgttggcggccacgctgctcaacttccttgtctgctttgggccctacaacgtgtcccatgtcgtgggctatatctgcggtgaaagcccggcgtggaggatctacgtgacgcttctcagcaccctgaactcctgtgtcgacccctttgtctactacttctcctcctccgggttccaagccgactttcatgagctgctgaggaggttgtgtgggctctggggccagtggcagcaggagagcagcatggagctgaaggagcagaagggaggggaggagcagagagcggaccgaccagctgaaagaaagaccagtgaacactcacagggctgtggaactggtggccaggtggcctgtgctgaaagctaggtcctccgggggaggagggtgtagctggcatgtcatcctcagggcgcttcctcgctcacgccaggagggacttggagtggcgagctggggcccgatggggcttgggggcagagtagacatctagcctccctaagggtatgcgcgctaaagcccagctctcgatctcacctccatccccatccacccacacactatggattgggctctgggaaggggtcagggtgagaggctgctctggagaacaatgaggtcctcatagcagcaggcagctcctgtgttttcttgagggtggcagaggagctaagagcagtgcccagggtctgagggggctgcccagtgagtggcaggggcaggagaggggagaaccccatcctcagagctgctcccagccagcgagtcaggagcgggggagacagggctccagggatgaggccgcattctgctcccacagcgccttttccagaaagttcccattgctcaataaatgtggatcatcagagacatttatgaacaatgacagaagaaaaattacccaaataaatgtggaagcaagcaaaagagaacagtgtttccttcttctcctgttttgttctggtggtgtgcttgggccgggtgggactggtggatggaaggagaaaacaccagactctggaggaaaagggccaaacaccaggatgcctggatgctgggagaggatctggcttgcagggatgaaaataacagctgccctgtctaaaggacttggcctgacacatcatctccttctatctctcaatagccctgtgagaggtaccagcattatccccagtttcagatgaaggagtggcccagagaggtgacacctcctacctgagatcccatagctggtgggcgattgaagtgggaccagaagctggtgtcagttgactctgacacccatgcccctaagccactctgctgttctccatctgtgtgtcacctgtggtcacctggcccagtcaaatgtcccaagtcagataagtctgtctgagcaggacaaatataaacaggccatgataagaaacagaactaaatgcaaagcgtattgactatttgtgtgggttcaaccttttcccagtaaaaaagccctcttggaaaaaaagaaaaaaagataattagtcagcacaatggacttcaggtttctgcaaagtcagagagatgttcctcagagctctattcatcaaaatatggccattcaggaagttttcatgttccctgagtggtggcccatgagaaatagctggtcaggacctcctccccaagcaaggccacctgagactcgccagcccctgtttgcatgctgtcagcagtatttcagaagcatttgttgaacacctattgcatgcagatggctgggctcagaacttcggggagttcgacactaaggtctttaaatatctgcttcctccctggggttaagtgtgccgggagaatgaagactggctgtgtgtggggaagtggatttcaggtggaaggagagggactctgtggagagttgaaaccatgagctgtctctctgtcccacggctcacctgtccatccccagggcactcagccctggtggctgcaaagaagttgatgcaggtaggggtgttcatggctcagaaaggggacaaaggtgccatggaatcctgcaacttcagaatgggcaccgccaccccaaggcagagaacagaaaaactgaaaacctcacagtcgaaagagagccatgaagagctggagtctccctcctcccccaggtttataagagggaataagaggcagcttcatgggctttgctgtccccagctatctcccagcccagcccagtctgtataagcaaaagcccaggggtggggaagatgaaaagccatcagggtgtgggtgatcgtgggagtgggggtgaggaggatgttggagcattttccatacatctcagaagcccagggaacggggctgtcatagaacgggagatgcatctggggctgccgcttggtgccatctaggtggggtgggagaaaggcagagagaggaggtgggagaagactgtggggggtgcagcagctggcaccctctccatcgggcagagcaagtaggtgtgaatctcccatgggtgaagcgatcacacgcaaaaaggagggagatggcatctttggagggaggtggtgataggctgagaccccctcgttgtcccccccgaaacctggtgaccggagctgccaggaggccacacagagagaggctgatgatgggggacctggaacctggaaggggcagagtggtcagatgacccacacacgcctgagaaaacagatgtggagaggctgtgttgtcattctgaggcaggaaacagagacagacagacagacagacagacaccggcacagtgagagacagagacagattcacagagcagagctggcttctcactggcaggcatgggcacacctgagagagcatccagagaggttagaaatcttccttaggtcctcctgggaggctcaagtggccccaccggggagctgaacagctggctggatttccagggttgagagaaggaagctgcgcagccggccagggccacatcccctgtgcctcagggagggacccccagtgtccccaccacactccccaggaggagtccttggagttgaggccactgcctgagtcctccagtgccagccagcggaggttgctcccgtcccttgtcttcctcctccccatccttctgccagccctggaaaggtcagaaaccaccattgcggagctagaggggaaggagaggcagaacagaggggcctctcctcgcaaaaactaaaataagcccacagcctgtgcagaaccgcacccgggtgtgatcactccttaccccacacacccactgccacttggagatggtttcacggctgcagtcacagggcaccctgtgttgtcaggggtgagccagcaaggcccggggcctgcccaggggtacattgagggtggagaagacctggccccagtgcaggtgtgaacaggcaggagggctggggagggaatagcgctgggttgtggccgagcccccaagccctgctcttgagaggcactggctacacactcggcccctacccagacaggacgctgattcctccctggcccttctgtgttcctgcatcttccaagaccctcacctcctccagtgccgcatcagctccagccaggatgccccatcagcttctcacccaagctgctagaacctcaggctaatagccctgtcattccagctcactccccccgtccccttctggctcactgcccatcctgggcatcctccatcagcccgctgaggggactgctgagcctcagggacatctggcagcaccaggaggtgggtccctctctctgtggctcctctcttcacctgactgttccccagacccccagaccacccctgcccaggtggcccctgagaactgctaagctcaaccgtgacatggatggggcccagctgacccttgggctctccctgggggacccccttttcctgtccctggcgacaccctcaccttattcacacccgtctcctccctgctgccccgccggctttccactgtgggtgtcggggggtcagctcctgccttgccagggaaccagggaaggcagtgggctcaggagtcaaactcccattcctagagaagactcaggcagtgggcccagccctgttctgaattctctccacccctcctccccacagagtctcagaaatcaagaagctttcttcctctgggacccacgcgtgaagtcctatctcctgtgaccctgcaggtgctcccctcattttaagagatgatgtggagagaaagcacaggactgggggccacagcttctcatccaggctccgctgctccctggctgctgcattcctctgtgggcctccgtttcctcggtgatcccaccaggcgaattgtaatcctccaggcagggctggaacccatgagtgatcccaggagcccctcctctctggggcctcaagatctgaggacggtgagccagttgtacacaggagccgtgcaggccaggacggtggccccatggacctgcccccgcagctctccttagccctctatgggaccacctggcttgtttcacttagcgtaatattttaaagattcactcgtgatatagtacagcagtccccaaactttttggcaccagggactggttttgtggaaaactatttttccatagacctcaggggagtggggggatggttttgggatgaaactgttccacctcagattgtcagacattatttagattgccataaggagcgcgcaacctagatccctcgcatgtgcggttcacaatagggtttgcgctcctgtgggaatctaatgctgccgctgatctgacaggagctcaggcggtcatgccagcttgtctgcccactgctcacctcctgctgtgtggctgggttcctaacagaccactcacctgcacgggtctgcagcccggggttggggagctctgacgcagtaggtataggcagctcattcctttttattgccaaatagaattccagtgtatggatgtgccactatttttatccactaactagcagaagggcctccaggtgaggtttccacttttagttctttttctttttctttcttttcttcttcttttttttttttatactttaagttctgggatacatgtgcagaacatgcaggtttgctacataggtatacatgtgccatggtggtttgctgcacccatcaacccgtcatctaggttttaagccccacacgcattaggtatttgtactaatgctacccctccccttgccgcccatgccccgacaggctgcggtgtgtgatgttctcctccttgtgtccatgtgttctcattgttcagctcctgcttatgagtgagaacatgcagtgtttggttttctgttcctgtgttagtttgctgagaattacttttggttcttatgatgtatgctgctacaaacattgaggactgagtctttgcttagacaaatgttttcacttattttaaataaatacctatggtggaattattggatcacatgttaaattgatgtttaactttttaagaaactgccacctgctttgcaaagcagctgtaccatctgacattctcagcagcaatgagaggcccctgtttctccacatcctcaccatcacttgttattgtctgccttttgcttatagccattctagtggatgtgaaatggcatcattgtgctccgtaagtatttgaatgaagaaataaattacctctgcactggagagcacttgggtttgaacccgggtggtgatatttaataagctgtatcacctggagcaagtcacttccccactgtgaggcacaaaggatttcatgacaataggggatgccttgagaagtggagtatctctggatctgtggattatatgcctaccgaaaagcagttgttatcatcaccaccgccaccattattattattactgtcaccccagagacatgcccacacctgtgacctggatgctggcagctgacaggtgctgaacacacaccatcacatgccaggcctccttcaaagtacttgacacagctcttatatgggatttcacaaagggcggcacccaactctccctcactacaggagcagcagggtctcagcaatgtaggacagttcacagagttgcatgctctggacttggggtagagactctgccatgatgcctatcttaattgtagctggcagagaggcggatctacagtccacaacagcactttggctgggaaccaaaggatgaagactttataaccagaaggtcatgtgccatgtaacaggggtgtagggaagtagatcatgcttctgttggcttaggacaaggagctggtgcaccccttacccctttctgtgtcacttcagagcaccccatcacgatctcttcctgccactcctgtcaaggaaggtgtgaccactgggccctggcctacctgccagctcttcttaagtgccatctactagacttcagcttaaattgcaccacgaaacaaaaatatattgctacaacatgcggcatctgagaaagcaaccgcatgaacctatctgcaaccaagaacttgtacagagccttggccctccgaaagcatccagaaatgaagccagttgatcatacacaacacacaccatagtcataccttcaacagaaaaaaagaataaaaaaattaaaaagccccacccaaatgaaagcaaattttgaaaaagaagcatcagccctctcagatgagaaggaatcagcacaggactctggcagtacaaaaagccagaatgttttgtcacctccaaaggatctcactagctccctagaaatgtatcctgaccaaattgaaatgctgaaaatgacagatctagaattcagaatgtgagtggcaaggaaactcagcaagacccaagagaaagttgaaatgcaatactaagaagccgtaaaaatgagccaggatgtgaaagatatatatatagggggggaaaaaaactatatatagagagaaagaaccaaaacacaaaaagaatcaagcagaacttctggaattgaaaaatttactacaggaatttcaaaatactgttggacacctcaacaatagactagaccaagtagaagaatttcagaggcagaatgaattttttaaattaacctagtcacacaaaaataaagaaaaataattttaagaaatgaacaaaggctttgagaagtataggattatgggaaatgaccaaactatgacccactggcattcctgacagagaagaagaaaaaataagcaacttggaaaatgcattttaacgtataattcaggaaaatgtccctaatcttgctaaagaggtcaacatgcagatataagaaattcagggactgcctgagaggtactatacaaaatgaccatccccaaggcacatagtcatgagactgcatgaaagaaaaatatctttaaggaagctagaaaaaagagccaaattacctataaaggaagtccactcagaataacagtggatttcttagcagaagtcttacaatttagaagagattgggtgcctatttttggcttcttttttttgatggagtcttactctgttgcccaggctggagtgcagtggtgcgatcttggctcatggcaaactctgcctcccgggttcatgcaattctcctgcctcagcctcccaagtagctgggattacaggcatgtgccaccatgcccggctaatttttttgtatttttagtagagacggggtttcaccatattggccaggctggtctcaaactcctgaccttgtgatccacccacctcagcctcccaaagtactgggattacaggtgtgagccaccacgcccagccttctaggcttcttaaagaaaaaatgccagccaagaatttcatatcctaccaaactaagtgtcacaaaggagaaataaaatctttcctagacaatcaaatggtaagagaattcatcaccaccagactggtccaacaagaaatgctcaaagaagctgtaagcatgaaaacaaaagaatgatacttgctaccacaaaagcacacataagtacaaagcccacagaccctataaagcaactacccaaccaagactacaaagtaattaactaacaacacgaagataaatcacaacagggacaaaacctcacatattaaccttgaatgtaaatggcctatacactccacttaaaagacatagtgtggaaaattggataaaaatatgagacccaaccttctgctgtcttaaagagacccatctcacatataatgatacccaaaccctcaaagggttggagaaagatctctcatgcaaatggaaaacaaagggttgctattgttgtatgagataaaacagactttaaaccaacaacagtaaaaaagcacaaataagggcacttcctaatgataaagggttcgattaaacaagaagatttaacatcctatatatataaacacccaacgctggagtacctagatttataaaacaattactacgatacctaagaaaagagatggacagccacacaataatagtggggttcttcaacagcccattgacagcattagacagatcattgaggcagaaaactaacaaagaaattctggacttaaattggacacatgatcaaatggacctaatagacatctacagaatactctacccaacaaccacaaaatatacgttcttctcatctgcacacagaagatactctaagattgacccaatgcttagtcatgaagcaaatctccataaatttaaagaaatgaaaattataccaaccttcttctcagaccacagtggaataaaaatagaattctcaaaatcacacaaatacatggaaactaaacaactatttcctgaatgactttggggtaagtcattaaggaagaagtcaaaaaattaaggcagaagtcaaaaacttctttgaaacaactgaaaatagaggcacaacataccaaaacctctgggatacagcaaaagcagttttaagaggaaattttatatcactaaatgcctacatcaagaagttagaaagatctcaaattaataacctaacattacacctgaaggaactagaaaaacaagagcaaactaaatccaaagctagcagaagaaaagaaataactaaaatcagagtagagctaaacgaaattgtgacaaataagccattcaaaggatcaatgaaatgaaaaattggttctttgaaagaataaacaagatttataggctgcaagctagattaacaaaggaaaaaaaaaaacctccaaaaaagcacaatcagaaataacacagacaagattacaactaattccacagaaatacaaaagatcctcagagactgcgatgaacatctatattcacatgaatcagaaaatctagaggaaacaaataaatttctggaaacatacaaccaagattgaaccagaaagaaattgaaactctgagcagaccaataatgagttacaaaattgaatcagtaataaaatatctaccacctttaaaaagcccttgaccagatggattcacagccaaactctaccagacctgcaaagaagagatggtaccaatcctactgaaactttaccagaaaattgaggaggagagattccctactcattctacaaaaacagtctgattctgatatcgtaatctggcaggacacagtgaaaaaagaaaactgtaggccaatagcccgatgaacatagatccaaaaatcctcaataaaatactagcaaaccaaatccagcagcatgacaaaatcataattcagcatgatcaagtgggctttattcctgggatgcaaagatgtttcaatatatgcaaatcaataaatgtgactcaccacataaaattaaaaacaaaaattatatgatcatctcaatagatgcagaaaaaaacatataataaaatccaacatcccttcatgataaaaaccctcaaaaaactaaacatcgaaggaacacacctcaaaataataagagccatccaggacaaactcacagccaacatcatactgaatgggcaaacgttggaagcattccccctaagaaatggaaaaagacagggatgcctactcccactactcctattcaacatagtagtggaagtcctagccagagcaatcaggcaagaaaaaggaataaaaggcatccaaatagaaaggggaagtcaaattatctctgttcactgatgatatgattctatacctagaaaaccctacagattcctccaaaatactcctagacctgataaatgactggcagtttcaggatgcaaaatcagtgtataaaaatcagtagcattactatataccaacaattgtcaagctgtgagccaaataaagaacagaatcccaattacaatagccacacacaaaaataaaatacctaggaatacatctaaccaaggaagtgaaagtgaaagatctctacaaggagaactaaaaaacacaaataaatgaaaaacattccatgttcatggattagaagaatcaatatcattaaaatgtccatactgctcaaagcaatctacagattccacccaattcctaccaaattatcaatgtcatttttcataaaatggaatcattctaccaaaaagacacctgcatgtgtatgtttgtcacagcactattcacaatggcaaagtgatggaatcaacttaggtgcccatcaatggtggactagataaagaaaaaatggtacatacacatcacgaaatactatgcagctataaaaaagaatgaaatcatgtcctttgctgcaacataaatgcagctggaggcctaagtgaatgatcctaagtgaattaacacagaaacagaaaatcaaatgctgtatgttctcacttttaagtgggaggtaaacaatgggtacacgcaaacattaaagatggaaaccatagacagtggggactccaaagtgggggagggagggcggaggacaagggtgggaaaactgcctattgggtactatgttcacaattttggtaatgggttcaatagaagcccaaacctcagtattatgcaatatacccatgtaacaaacctgcacatgtgctcccgaatctaaaataaatattttcaaaaagcaattgacctatattattaacattttaatctacctgtatatatgttttaatctgcatgtgttcatgctttgaaatatggtacaggtactatgacaatccctgttctgtaggggaggaagaagagacacatctcttcccccacatcacaaagtcaggaaggaacagacctcacggagtccagtctgtcactggctcatgctttgtgcccttaaaaggcaaactggataagtgccattctagagaatcagacaaaattcaagtggaagagaggggaggggaagaagacgtcagctggggcctgtttggagcatcccagctgaggctgcgcaaggagggaggcacgcagttgtggaatttgttcccctttttgcatactgaccagccctggcaacggagctcaaggcatctttgtgccactgctcaacagtgagtgatgtcatgggcacggccaggtctttatcagttctgccggataaatagccaactgcactaggtctggagagacagcaaggtgctgtgcggcagagcatttggggtctcaaagaagcaggtgagcctgggcccgaggggctgggtggaggagcaccttggtgcttctctgctggggaagggacaggggacagggcatgctcaggaagacaggcaggctgaccccgcctggaaggcacccagagacaagaggggtgggcgtagtgacctcgtgcccttttaggggagatgctgctggccagaggccgttagggcccccactaccaactccatgttactctctctcaccagtggccaccaccatggatacaggccccgaccagtcctacttctccggcaatcactggttcgtcttctcggtgtaccttctcactttcctggtggggctccccctcaacctgctggccctggtggtcttcgtgggcaagctgcggtgccgcccggtggccgtggacgtgctcctgctcaacctgaccgcctcggacctgctcctgctgctgttcctgcctttccgcatggtggaggcagccaatggcatgcactggcccctgcccttcatcctctgcccactctctggattcatcttcttcaccaccatctatctcaccgccctcttcctggcagctgtgagcattgaacgcttcctgagtgtggcccacccactgtggtacaagacccggccgaggctggggcaggcaggtctggtgagtgtggcctgctggctgttggcctctgctcactgcagcgtggtctacgtcatagaattctcaggggacatctcccacagccagggcaccaatgggacctgctacctggagttctggaaggaccagctagccatcctcctgcccgtgcggctggagatggctgtggtcctctttgtggtcccgctgatcatcaccagctactgctacagccgcctggtgtggatcctcggcagagggggcagccaccgccggcagaggagggtggcggggctggtggcggccacgctgctcaacttccttgtctgctttgggccctacaacgtgtcccatgtcgtgggctatatctgcggtgaaagcccggtgtggaggatctacgtgacgcttctcagcaccctgaactcctgtgtcgacccctttgtctactacttctcctcctccgggttccaagccgactttcatgagctgctgaggaggttgtgtgggctctggggccagtggcagcaggagagcagcatggagctgaaggagcagaagggaggggaggagcagagagcggaccgaccagctgaaagaaagaccagtgaacactcacagggctgtggaactggtggccaggtggcctgtgctgaaaactaggtcctccgggggaggagggtgtagctggcgtgtcatcctcagggcgcttcctcgctcacgccaggagggacttggagtggcgagctggggcccgatggggcttgggggcagagtagacatctagcctccctaagggtatgcgcgctaaagcccagctctcgatctcacctccatccccatccacccacacactatggattgggctctgggaaggggtcagggtgagaggctgctctggagaacaatgaggtcctcatagcagcaggcagctcctgtgttttcttgagggtggcagaggagctaagagcagtgcccaggtctgagggggctgcccagtgagtggcaggggcaggagaggggagaaccccatcctcagagctgctcccagccagcgagtcaggagcgggggagacagggctccagggatgaggccgcattctgctcccacagtgccttttccagaaagttcccattgctcaataaatgtggatcatcagagacatttatgaacaatgacagaagaaaaattacccaaataaatgtggaagcaagcaaaagagaacagtgtttccttcttctcctgttttgttctggtggtgtgcttgggccgggtgggactggtggatggaaggagaaaacaccagactctggaggaaaagggccaaacaccaggatgcctggatgctgggagaggatctggcttgcagggatgaaaataacagctgccctgtctaaaggacttggcctgacacatcatctccttctatctctcaatagccctgtgagaggtaccagcattatccccagtttcagatgaaggagtggcccagagaggtgacatctcctacccgagatcccatagctggtgggcgattgaagtgggaccagaagctggtgtcagttgactctgacacccatgcccctaagccactctgctgttctccatctgtgtgtcacctgtggtcacctggcccagtcagatgaggctgtctgagcaggacaaatgcaaacaggctgtgataaggaacagaagtaaatgcaaagcacagtgagtatctgtgtgagtgcatcctctccccagtaaagaagacttcttgaaaagtatagattacgatacttggagtcaatgattgggcaggtgactcacagtgggcacccgatgctcctcgatcttagctaatgcaggatctcttcaactttttacatccttgtccccttcagaagcctctttggatatacatctttcctacacagcacattcctctgcctgcttatgcaatttcagtgcaaccaacacactgtcggtttatgtgttgtggccctttacaaagacagaaactggctgggcgcagtggctcatgcctataatcccagcactttgggatgccgaggcaagagaatcacttgaggtcaggagtttgagaccagcctggccaacatggtgaaactttgtctctactaaaagtacaaatattagccgcatatggcagcatgcacctgtaaacccagcttcttgggaggctgaggcaggacaatcacttgaggccaggaggcagaggttgcagtgagccgagattacaccactgcactccagcctgggtgacagagtgagactctgtctcaaaaaacagaaggaaggaaggaaggaaggaaggaaggaaggaaggaaggaaggaaggaaggaaggaaggaaggaaaagaaagaaggaaggaaagagagaaagaaagaaagagagaaagaaggaaagaaagagagagagagaaagaaagaaagaaggaaggaaagaaagaaagagagaaagaaagagagaaagaaggaaagagagagagagagaaagaaagaaggaaggaaagaaagaaagaaggaaagagagagaaagaaagaaagagagaaagaaggaaagaaagagagagaaagaaagaaagaaagaaaagaaggaaaagaaagccacaaaccattgtgagattttttgttgttgttgttccccaagaactagttttcacctatttgggatcaacattgctgctgctgagaatgtctgagctgcagaaatggtcccatctaatatactgatagagcctgtctcacagaactgtagcccaacaaaattaggctgaggaccttgctgcaggaatggagatcacactacggaagaagtgtgaggtctcgtacaagagaagagacccagttatcatcgaatttgagctaagagtagcgtgaatttagatgaagaggtgtgtgataggctcaacacaaagcagggatgtgtggaaagaggccagtgttagatggaggccaggaagattactcaaggtcctgtttctctggaaaataccaagcaaagataaaggtagaacttcgtattggaaaactccttatctgaagctctggtgggttgaaaatcaaggttgcatctctgtgtcagagactctgatcctctaagcagaagtatatgttcctttcttactcatgatctcatgcagctaagtttctgactatctttgacttttgagaacaaggtttcttagcaatatccttttgttaattagcaaaacaagtttttaaaggtttacaagagaaacttttttagaaggagagatcctccttcaccgaaaccaagggcaggtcaacccagaaggacaagaggaagggaagattcaacccatctcggctacagcttcctgaggccataggtcaagtctcagcttacaggggagtgagaggaaacaagaaattttaaatcacccagtgttggttgggtgcgatgactcacgcctgtaatctcagtgccttgagaggctgaagtgggaggactgcttgaagcaagactccgtaatctaagaaaaaaagttagtcgggcatagtggcatgtgcccatagtcccagctgctcatgaggctgaggcaggaagatcgcttgaacccaggaggtcgaggctacagtgagccgtgattgtaccactgcactccagcctgggtaacagagcaagaccctgaaaaaaaaaaaaaaaggaaagaagaaaggaagaaagaaagagagaaagaaagaaaaggaaagaaggaaagaaagaaagaaagaaagaaagaaagaaagaaagaaagaaagaaagaaagagaaagaaagaaagaggaaagaaaggaaaggaaaggaagaaaagaaaagaaaagaaatgagtaaatcaccaagagtgcgggaagatcgcttgagcccaggaggaggtcgaggctacagtgagccgtgattgtaccactgcactccagcctgggtaacagagcaagaccctgaaagaaaaaaaagaaaaaggaaagagaggaaagaaaaaagaaagaaaggaaggaaggaaggaagggaaagagagagaaagaaagagagaaagaaaggaaaagaaaagaaagaaatgtataaatcaccaagcgtgaccagaaacctttggaagccacctaagaaactgacaaagatggttcaatccatcccatggaaggcagtgagaccattgcaggcttgagcccagtacgctcagactactcagtaaaccagtggcagtggcagacaggagagagagcaggaattccccactgggagacaggatgccagtgcctttttatgagttaaacatgtatccactagagagtgcagtaagtggcctctcaggctgtgcatatgcctggtggggcatgggaagctgtgctgcaagacaggatccgtcagccggcttcaactgggttcagctgggagggggcagacatagacctggtcagggccggcggaggtggaagggaggtaggaggctggacttgactttggaggtggggctcagacactggaccaaattgaggactagctaaaacagggaaacaaggacggagcttaagcgacttcccataggacatgcccaccagtgtcccctgtcagtttaccatggtcatagcaacagctggtaattaccaccctttttctaaaactttgggcattaaccgccccttaatctgcatgtaatgaaaaatagatataaatatgaatgcaaaactgccctaagcggctactcttagcacattgctatggggtagccctgctctgcaggggcagtcacagagctgttgcactgccagaactataccaccatcactttaataaaaccactttcttctaccactggctagcctttaaattctttcctgggtgagctgggtgcagtggctcacacctgtaatcccagcactttgggaggctgaggcaggcagatcatttgtgatcaggagttcgagaccagcctgggcaacttggtgaaacccagtccctactaaaaaatacaaaatttagccaggcgtagtggcccgcacgtgtaatcccagctactcaggaggctgaggcaggataattgcttgaacccaggaggcggaggttgtagtgagctaaaattacaccactgcgctccagtctgggtgacagagtgacacaccatctcaaaaaaaaaataaaaatttaaaaattaaataaataaattctgggttctgggcaaagccaagaaccttcccaggctaaacccctatttagggctcatctgccctacatcagaagggaaacaaagaccagacaaggagagcaagaagcctgggagtctacaaaataagttgcgggactcttccaaaaaaatgaagctgagcatcgataaaagctcaaagacacctggaagaaaagtgagaccaccgtttctgggaattacaagtaggagacagaggtttttattgggggagaatagtgtgagaaggtgctcaacttttgaccttcctctctgaggacatgactcttctggtttagaaaacaacagtaaaaagtccccaagagatactggtggttgtggttcccaaaacttcattaacatctgtgggaagccttctgactttcctctgaggccagttctgaaaagccattcatatggaggcaaatcaaaatatcaaagcagcagcctgtgttctgggaaaatgttgctgggatcacattccagagaaaagatgggatagaaggaatgaaagctgatcaacatggctgggtgcggtggctcacacctgtaatcccagcactttgggaggctgaggcaggcagatcacctgaggtcagaagctcaagaccagcctggccagcatggtgaaaccccgtctctactaaaaatacaaaaattagccgggcatggtggcgtgtgcctgtaatcccagctactcaggaggctgaggcaggagaatcgcttgaacctggtaagcagaggttgtgaggttgcaaagttacagtgagctgagattgcagcactgctctccagcctgggcaacaagagagaaaactccatctcaaaaaaaaaaaaaaaaaaaaaagaagaagaagaagaagaaagctgatcaacactggtagaagtggggaagggcagagctcacctcccatgggagccagggtggagctagcagagagaaaatgttgtgaaagaggaaatgggatacggaaatattttttgaggagagggtgcttttaatggatttagaagaatatagtggctggatatggtggctcatgcccataatgccagcactttgggagtctgaggcaggtggatagcttgagcccaggagttccagaccagcctgggcaacatggctaaaccctgtctctactaaaaatacaaaaattagaggagtatgttggtgcatacctgtagtcccagctacttggggggctgaggtaggaggatcacctgaactttgggaggtcgaggctgcagtgagccatgatcaggccactgcactccagcctgagtgataaagtgagacactttctcaaagaaaattaaaattaaaattaaaattaaaagaagagtatagtgagataacccaatcaatcatcccctgttgcagatcccccagtctcaagggtcaaattgtgattggcactaatcatgatgctgttgaccgcctttactggtgactggtcctaagatggaagtgtgacccaattccagccaacaaagggaaataagtctgctgggggcctctgggaaagatttttctctatctcattaaaaaaatagatgtgtaaggagctgcgctcctacttctaatctggaactttctatggaaggatgtgatacttggagctacagcagccatattggggccatgaggttacaaacttgaggaagaaagcaaacaagctaaggacagcagagcagcaggatgtaaagggcctgcgtccttgaccctgttgaggtgggaccaccaacctccaaagtcactgtagtaaatgttccttttgttgactcactattggccagataccctctaacttgcagcttaacataatagatcagcttatatcctactagaacctacccattgacatcttctctcacgttaaaatattttaggttcctggagtttctaaactctgcctatttgccttataggagctatgtgatgttagcatttgccttatttgttacagctgaactcaggagatgtcttacagttctagacactagctctagcaccaagatgtctggactctcctcattcagaagaaggcttttgagagctgactggctggggctgcatgaacattgctttccaagacaaaaaaacacacgtgctagatgggacctttttaaggtaaaatgttcatctgactgacaatcttaattgcaagcctgcacttttattaataaaaattctcatacttgagcagatcacctgaggtcaggagatcgagaccagcctagccaacatggcaaaaacctgtctctactaaaaatacaaaaattagctgggtgtggtggcacaggcctgtaatcccagctacttgggaggctgaggcaggagaattgcttgaacccaagagatggaggttgcagtgagccaagatcatgccactgccttccagcctgggcaacagagtgagactatttcaaaaaaaaaaaaattctcatacttactaagggctcttggatgccatggaaacaagagagggctgaaagacctctctttcttgatgtggaccatgagcgatgttatcctgtggaaaagtacttgtctctgttcagtgttcttgggcacaggacagctacccagtccttgtgcctgtggagtcactcaaacacacacaatgcccacatgaagatggggatatgcggtcttggatgcctaatttactacttaaaattaacacacacaattagatgattcccttttccctcccctccccttttttttttttttttgtttctttttttttttttctgtgacagggtctggctctgtcacccaggctggagtgcagttacgcaatcatggctgactgcagcctcaacttctcaggctcaagcaatcctcccgcctcagcctcccaagtagctgagactataggtgcatgccaccatgcctggctaattaaaaaaaaaaaaaaactgtagagatggggtctcgctatgtggcccagactggtctggaactcctgggctcaagcgatcctcccaccttggcctcccaaagtgctggcatgacagggatgagccagtgcacctagccttgataatttccagtggttctctatgcttagagcattactctcatcttttttttaaacagtctagaatgctctcttaaagcctccataaaaataactccttgtttgtgtatcctttggtgaacaatccaatgacttgcaggagcacttccaggcatccccagccgttgcaggcctgcagacttcttccctggcccacacttgctggtctgtttgttcactctgcagtgaacccttctgcttacagcttttccagctaaccttttgactcacaatgtagcctctgacaaaaagcagaccagtagttaccaggggctggggatgggagagaggagggtgttgactgggaagataacagagggacattttcaggtgatggaaatgttagatcacttgattgcagtgagggtcacacaagaagtcaaaacttattgaactctctccgtccagtgggtgcatttcatggtgtgtcaatgaagcctcaataatgttgtttttaaaaaatggtgtcacctcacctcctggcttgtagtgtttgtgtacctaatatcaatcttgctaagtttcctccagccaagcaagtctctgcttttgctgggctgctctgcagaggctgtgactgctggatgataacccaggttacataaaagtgtagaaaccatgtgcaaacaaatgatacgtggcaaccagcttttatcttggtgctggagatctgcagggcgtggtggaaagggcggcaactggacagtgcaatggttcatttcacctcctgtcaccacatggggctgtgggggcagctctgtcataccttccaattttccaagctgaaaatccaattgtcattgctgtttttgaaatcttacatttttaaaaaactgataacaaattcaaaatgtttaagtatctatgtggggaaagtgaatcaggcctgagggttgtggactgctttctaggtttccagcctgtgacctctgcagcagtggaggcagaggagggctcagaggtcgggagggaaggggaaggagcatgaagaagtgtgattctgcacgtaagcacggcccatacttttactcagaacccaagacaggcagttgacaagaacgtcggaagatgttcttcctcatccctcgttcttattttgcagtccctccctgcccctacagctgttctctgaaagctgtcaccctcatccacaaaaagatcttggaggccacaggcaaggcagggagggaagctccgaggactgatgctggctctccttccttctcctcccaactccccctcccaactggcactgaaggcaggtgttcctcaggctcggaccctgcctgcctttgttcgttttctctctcctgtctgcaggcattctgatccatcacaatggctgttaacattcatgactcccacatctccagcaccagacccttgtgtatccaactgtatagagagacatctcaacttctagactttcaagaccaaacctaactccttacttcgtcttcctaatctggccccaccacccagcctactccacctctataaatggcaataccacccacggtctgcccacatcagaaacccagatgtcattcattaattcattcattcattccttttttttttttaaacagagtcactctgtcacccaggctggagggcagtggcacaatctcagctcactgcaacctccacctcctgtgttcaagcgattttcctgcctcagcctcctgagtagctgtgattacaggcatgcaccactatgcctggctaacttttgtatttttactagagatggggcttcgccatgttgtccaggctggtcttgaactcctgggctaaagcaatctgccagcctcagcctcccaaattgctgggattacaggcatgagccaccatgcccagcccattctttctttttttagagatttgattctttttttaatttttaaaatgatcatacaataaaatgaatgttttcaggaaaaggtgtacagttctgtgaatcaaacagacagagagattcccgtaaccaccaacaaaatcaagataaagagcaacgatagtcacatcttcccttcacccctagccactacgaaacacagatctgctatcattagggttttatcttctcaagaatgtcacatagcttttcgcaacaggtttgcaacagaacacaggtgtcatggaaactacccctaaaagccaaaatgggaaaggagaagactcatatcaacattgtcgtcaatggacacatagattcgggcaagtccacctctactggccatctgatctacaaatgtggtggcatcaacaaaagaagcattaagaaatttgagaagaaggctgctgagatgggaaagggctccttcaagtaagcctgggtcttggataaactgaaagctgagcgtgaatgtggtatcaccattgatacctccttgtggaaatttgagaccagcaagtactgaatgactatcattaatgcccctaaggaatgagaccaccacttctcctgttgtccttcccagcttctacccaaccttcccttttccctagtttataagacaggagaaaagggagaaagcaaaaagttggaaagaaacaaaagtaagataaatagctagacgactttggtgccaccacctggccctggtggttaaaataataataataatattaacccctgaccaaaactactggtgttatctgtaaattccagacattgtatgagaaagcactgtaaaactttttgttctgttagctgatgtatgtagcccccagtcacgttcctcatgcttacttgatctattatgaccctttcacatggaccccttagagttgtaagcccttaaaagggctaggaatttcttttttggggagtttggctcttaagacgcgagtctgccgacgctcccggccgaataaaaacttcttccttctttaatccggtgtctgaggagttttgtctgtgactcgtcctggtatatcccaggacacagagacttcatcacaaacatctttacagggacatctcaggctgactgtgctgtcctggttgttgctgctggtgttggtgaatttgaagctggtatctccaagaactggcagacctgagagcatgcccttctggcttacacattgggtgtgaaataactaatcactggtgttaacaaaatggattttattgagccaccctacaaccagaagagatatgaggaaatcattaaggaagtcagcactatattaagaaaattggctacaaccctgacacagtagcatttgtgccaatttctggttggaatagtgacaacatgctggagccaagtgctaacatgccttggttcaagggatggaaagtcacccgtaaggatggcaatgccagtggaaccatactgcttgaggctctggactgcatcctaccaccaactcgtccaactgacaagccctgcttctccaggatgtctacaaaattggtggtattggtactgttcctgatggccaagtggagactgttgctctcaaacctggtgtggtgatcacctttgctccagtcaacactacaactgaagtaaaatctgtcaaaatgcaccatgaagctttgagtgaagctttttctggggacaatgtgggcttccatgtcaagaatgtgtctgtcaaggatattcattgtagtaacaatgctggtaactgcaaaaatgacccaccaatggaagcagctggattcactgctcaggtgatctatcctgaaccatccaggccaagtcagtgctggctatgcccctgtactagattgccacatggctcacattgcatgcaagtttgctgagctgaaggaaaagattgatcgctcttctggtaaaaagctggaagacggccctaaattcttgaaatctggtgatgttgccatcattgatatggttcctggtaagcccatgtgtgttgagagcttctcagactatccacctctgggttgctttgctgcttgtgatatgagacagacagttgcactgggtgtcatcaaagcagcggacaagaaggcagctggagctggcaaggtcaccaagtatccccagaaagctcagaaggctaaatgaatattatccctaatacctgccaccctggtattaagcagtggtggaagaatggtcttagaactgtttgtttcagttggctatttaagtttagtagtaaaagactggttaatgataacaatgcatagtaaaactttcagaaggaaaggagaatgttttgtggaccactttggttttctcttttgcatgtggcagttttaatttattagtgtttaaaatcagtgctttttaatggaagcaacttgaccaaaaatttgtcacagaattttgagacccattaaaaaagtttaatgagaaaaaaaaaaaaagaaagtcacataaacagaatcctacagtgtgtaaccttttgagctggcttctttttatttattttatttatttatttatttttttgagacagaatctcactgcaatgcccaggctggagtgcaatggtgcaatctcagctcactgcaacctctgcctcccaggttcaagcaattcttctgcctcagcctcccgagtaactggaattataggcatgcgccatcatgcctggctaatttttgtatttttagtagagacagggtttcac[131 bp omitted]ctgagcttcatccatgtcaccatgcctggctaatttttaaattttttgtagagacaggatgtcactatgttgcagaggctgatctcaaactcttaggctcaactgatcctcccatctcagcctccaaaagtactgtaattacaagcatgagccaccacactcgacctcctatttacttcaccttggaagctacagtgttacccagagcctataaacaaacaaacaaaaacaccatggatattttgttcctggtacacaaattaatgtctttaaatccaccaacaccactatacattctatgcaattaaaaaattaacttgaggccgggtgtagtggctcacacttgtaatcccagcactttgggaggctgaggagggcagatcacttgaggccaggagtttgagaccagcctggccaacatggcaaaaccccatctctactaaaaatataaaaattagctgggcatggtggtgtgcacctataatcccagctactctggaggctgaggcaggagaatcacttgaacccaggaggcagaggtagcagtgagccaagatcatgccactgcactccagcctgggtgacagagtgaaactgtgtctctaaaaaacaaaaagaaaaagaaattcacctaaggcacatgaccagtaagtcccttagtgctagtaccgtctatgcaaaatagcaaatacagagtgaaacaaaccaatgcaagcatttatgtgaaattgggctgcatgcgaaatctggcttcatgcttaactacattaaaaacaattgccaaactgtcaatgtatttcttcacaatatttcttattttaacttcatcacaactaagagctttaactatgaacaatgttaactagtcaaatttctgtaattttccaccatgttttaaataatattttatttttattttattttatttttttgagacagagtcttgctctatcatccaggctggagtgcagcagcatgatcttggctcactgcaacctctgcctcccaggttcaagcgattctcctgcctcagcctccctcaagtagctgggactacaggtgcccaccatcacgccctgctaatttttgtatttttagtagagatgggtttttaccatgttggccaggctggccttgaactcctgacctcaggtgatccccttgcctcagcctcccaaattgctgggattacaggcctgagccactgcgtccagtcaaaaatatcttattaactaaactttttcaacttcctgttttttctgtatgttcatgaacacagacacttagagaaacagaaaaaaataaaaaactgtgtatgacttacatagaccatctatgacatgcttggacttcctgttgtgtcctaattttatttatttatttatttatttatttatttatttatttatttattttttgagacagagtcttgctctgttgcccaggctggaatgcagtggcatgatcttggctcactgcaatctctgcctcccggattcaagcaattctcctgcctcagcctcccaaagagctgacattgcaggtgtgtgccacttcgcccagctaatttttgtatttttagtagagacggggtttcaccatgttggccaggctggtctcgaactcctgacctcaggtgatctgcctgccttagcctcccaaagtgctggaattacaggcatgagccactgggccccacctgtcctaaattttttatattttaaataacccctcattttactttaggacagaaatttacaatgcaagatcctttctcctacaaaagtattttctttataaccttccttaccaaaaacacatctttatatccataactgtcttcacatctctctcccctttgctttctaccttgtttcataaataactttcccaagcccataatgtgaatcaacctctagataacttctgaattagacaaaatttttcttattctcaataagaacgcatcttctttggcacattttacatacagaattatatgttaactagaattcttattcttagtaatcttaaattttagtgaaaacctaggaagcaagaaatcctgaactgccaaacagatgttagcattggcaagacaattctacaatttttaaaaacatgtttgcctacatcataaccctttctgaattggaaatgtcccagacatccaataaacacccaatataatttcaagattttaaattacatgaaaaatttccctactgcatttatcccatttacatttcattcatttttagcaatttatcctactaatgaaaattgggatattaaacaaagctagtcattatttcttcattaaccatttttataacctgtgaatatcaggtgttcacctaagtaagaaatttcgagttaaacacatgggtattttcacccgtaactcagaagattcctctgccttttttaaactaacaacattaaattagtcttacctatcaaaaaatcacacaaagatcattttgttcttggctagatttacaatcttataatcttttgtgccaaactctgacaccttaaaatatctagcagagacaaagataaaacccagacaaaaatgtatgctgacaattcagaagacatttctatttttattttaccgattatcttaaagccagcttatttattaaacatttacctaagtcacgtaaacttgaaaaatgcttggacccatacacttaatttatgagtgctcctttatttactggccaattttggtaccctgcaaaaacaacatataacatccaggaacatatgtacttgaaaagatccaatagcttttcctagggattcttgctgtgagatagcaatacaaattcaccagtttataaacatactcacacaggtaaactttgttttccctgataggtaattcaatgaaggctatgaaccaaaattttgagtaaagcactttctatgatagttttatttttattttatttttattttttgagacagggtcttgctctgctgcccaggctggagtgcagtagtgcaatcacagccacagcccactgcagccctgacctcccaagctcaagctatcctcccacctcagcctcctgtatatctgggactacaagcgcatgccaccttgcccagctaatattttaattttttttgtacagaaaggatcttcctatgtcgtctagcctggctgcaaactcctaagctcaagttatcctcctgctttggcctctcaaaacgctgagattataggcatgaaccactgtgcatgacctatagttttatttttatttatttatttattgagatggagtctcactttgttgcccaggctgaagtgcagtggcatgatctcggctcactgaaacctccacctcccagattcaaacaattctcatgcgttagcctcccaagtagctgggattacaggcgcctgccaccacatccagctaatttttgtatttgtaatagagacagggtttcaccatgttggccaggctggtctcaaattcctgacctcaagtgatctgcccacctcagcctcccagagtgctgggattacaggcatgagccaccacgcccagcctatagtttgatttttaaaggcccaacctccccagactccaaagaacactgaggccaaacagtaccacagaagaacatcatgtactaataaggccttgaaaccacctttgcaaagatgatgacagtgagagaagtctagcatgactgactccgtcttgcttctagccttacaggctggctgtcctcattattcctgggcataagccaagctaaccattggaggaatttatagtttaactttgaagcaaggatgataacaatctttccctaaaactataccctccttgctcagtgactgaagccacatttataaaactaatgaaaggccacaacattaggattatgggaggggcctggattctgttaaaatgtaggcatagtttcaataatctcttactgctcaggagtttgtggccagagatcacaagattcgtgacttccccgattgctcctatagacaacattgctattgtagaacgtgatcggtcttttgagatgtttttcagactttggcactctggcaaccaactgaccccacctgaacccatgactcatgactcaactggtcctgtggatcccacccagaggcagactcagtgcacaagaacaattttctacacccttacagttttatccccagctaatcagcagcacccatctcctagacctctgccaccaaataatccataaaaaccctagcttctgaatcctcagggagactgatttgagtgataactccagtctttctgtttggctagctctgtgttaattaaattctttctctactgcagtatcatggtctcagtgaattgtttttttctgtgcagtgggcaagaaaaatccttcaggcaattatagcccaacctggctttgaacagcaacataaaaacctggatacatggaactccatcccactttcccattcaacagcaaaatgagacccatggaggggccagagcgttgcaaaagaatatccattgatcaaattctcgtttctcacaactatattgacacacacacacataaacaaacaattatcaaaagcaattcaactgctacagcaacaaacaagccccaagtgtgtccatactaaaacagctggggtgccttcctctctcagttggtttttaaaggccaaaccaaacctttggtgggcagaagcctagggagtgggttctgctaattggttgggggtaaaactgtaggggtgtggaaaatggtcctcgtgcactgagtctgcctctgggtgggaaccacagaaccagttgagtcatgagtcatgggttcgggtggggtcagtgcgttatcagagtgcaaaagttgatcttgttccatctgcaaacagaaatatcttctgagtttcccaaatcaagagaagccctctggtacccaccagaaatcactcacatgtccagacgcagttgtgcacacacacaattactaatgtcaacaaaaagagtcaaactctgtaaaatatttgaagagatttattctgagccaaatatgagtgaccatggcccatgacacagtccccaggaggtcctgagaacatgtgcccaaggtcgttggggtgcagcttggttttatacattttaaggaggcatgagacatcaatcaaatacatttaagatatacatttgtttggcccagaaaggcgatacaactcaaagcagggtggggcttccaggctataggtaaatttaaacatcttctggttgacaattggttgagtttgtctaaagacctgggatcatagaaaggaaatgttcaggttaaaagattgtggagaccaaggttcttttgaagtcttacagtggctgcccttagaaacaatagttgacaaatgtttcctattcagacctttaaaaggtgctagactcttagttaatctcttcaggattgggagggcctgaaagaaaaagatctagctatgttaatagagattctttacagatgcacatttcccccccacaaaggacaactttgcagggccatttcaaaatatggcaaagaaacatgttttggggtaaaatattatgactttcttctttgtcgtgtaatgttataccagagtaagattggaaagtaagtcacaatatgtaagttaaataaaacccatctgggctgggcatggtggctcacgcttgtaatccctgcacttttggaggctgaggcaggcagatcacctgaggtcaggagttcgagaacagcctggccattatggtgaaaccccatctctacgaaaaatacaaaaattggcagggcgtagtggcaggcacctgtaattccagctactcgtgaggctgaggcaggagaattgcttgaacccaggaggcagaggttgcagtgagctgagatcgcaccattgcactccagcctgggcaacagagtaagactgtctcaacaacaacaacaaaaatctgatgagaatttatggtttgtagagcatgacttctctagaccccttagataggaatttgggcaagattttaaaaatcagagcttagttctcactaacaagccccaagagtgtccaaactgaaacagtcatggtgctttcctccctccatcatttgggcttattcaacctgcaaatggaaattccttagaaaattcccaaattgagaggagcccttcctgctgtctggaacccagaaaagacactcatccatccagacacagatatcaaatttcaaagtctgttcttcctaggcaatcagcaatacatttggggctggcagcagcagagccaaagagaaaaagatggaaacccacctccagccaaaaaaaggtcagacagctgtacagggggcttctgaaagtcccagtctgcagcagctgagccacaagcaatgtgttcccaggtagggaaccaaaatctgttactgaaatgccagggctccagtctaggtcccgttgctcactgcacagaaagccaatcaccaagacaatgagtactgcctgggaagaaggctttaattgagtgctttagccaaggaaaatggggatcagtctcaaatccatctccctagtcaactaaaatcagggggttatacagcagggaagaaatgtaactacatgtgggaaaaccagagttagggagaggtaaggaagaggagttggtcaaaggaattagggagggataaggaaatcaggagggatgaggggtctggcatctcattgtctggatgcagtgatctggtgagtttcaattcgttgatttcctgtggcaagaactcagataagacaaatgcaggcttcaaactttaagaccaggagggggccaggcacagtggctcatgcctgtaatcccagcactttgggagcccgaggtgggtggatcacgaggtcaggagatcaaggccatcctggctaacacagtgaaaccctgtctctactaaaaatacaaaaaattagccgggtttggtggcatgtgcctgtagtcccagctactcaggagactgaggcaggagaattgcttgaacctgggaagcagaggttgtagtgagccaagatcgcaccactgcactccagcctgggcaacagagaaagactccatctaaaaaaaaaaaaaaaaaaaaaaaaagaagggtgaatttctacgttgatccaaaagaagcatctatgggacaatcaggccagtttcatgaggaatataaattggatcctgtcattgccctgaataaaacttttcaatggctttccattctggcctcctcctcacagcctttgaggccctgcctctctctccaagcttctctggggccatccccagagaagtgtcactgacatcgctcttctggcctggacttctctctgtcccttgagcaggccaagctctgaatgtctgcatgcaccatgccttccactctttacctggctagttccccacttcttccaagtttctgtccaatgtcacgccttagagaggctttccctgatcatccaatatcaagtagcccccttctgatattatctcacactgcgctctcatggtttgatgtttgtatgtgtgtgttcatttgtttaacgtgactcctactagactgagaagcccatgacagcagtcaccacgtcagttttctttgtcactatatacccagtgggtgcctaaaaccgtgcctagcacagactgggcatttgatggtgaataaatgaatgaatgattttttaaaaatatctctaattttctactattataaataatgctatgagaacatccttttacataaaggcacgtgcactgtgcatttcctacaagtcgtactgttgaattaaatgatatgtacatgtaaagctttgataaatatcgatgaattaccttccccggctgagtcaaccctttcttccccaacagtctgtaagagaccccataactctgctgacaagagaaaatattgtattttaattttttgagatgatatttagaatttagaaacttaagtattagtctgggatttccagagaaacagaaccaatagagtgtgtgtatgtgtgtctgtgggtgtgtctgtgtgtctgtgtctctgtgcatgtgtctgtgtgtgtatgtgtgtctctgcggtgtgtgtgtgtctgtgtgtgtgtctgtgtatgtatctgtgtgtgtgtctctgtgcatgtctgtgtgtgtctctgtgtgtgtgtacctctgtgtgtctctgtatgtttttgtatgtgtgtctctgtctgtgtctctatgtgtgtctctgtgtgcatgtctgtgtgtgtgtttctctctgtgtgtgtttttgtgtgtgtctgtatatgtgtctccatgtgtgtgtctgtatgtctctgtgtgcgtctgtgtgcatgtatgtttgtggctctgtgtgttaatgtgtgtctctgtgtatgtgtttctgtgtgcatgtttgtatgtgtttctgtgtgtctctgtgtgtttttgtgggtctgtgtgtctctctgtgtgtgtgtatatctctctgtgtctgtgtgtgtctctgtgtttctgtgtgcatgtctgtgtgtgtgtccatgtgtgtgtctgtgtgttactgtgtgtctccgtgtgtgtgtctgtgtgtttctgtgtgtgtgtttgtgtgtgtgtgtgtgtgtgtctgcatgtctgcatgtgtgtataaagagatttatttaaggaattggctcatgtgattgtgaatgcttgatgagcccaaaatctgacggaggaagctggctgactcgaggctcaggaagaagttgtggttgagtctaaagagagcctgctggtgagccaggaagacccactgctgcagacaaagtctgaatccagcatgcaggagaattctcttttgcatgtggaggtcagccttttgtgctgttcaggccttcagtgactggaggagtcccccacattttggagggcaatctgctttgctcagagtccaccaatgtaaatgtcaatctcatccaaaaacaccctcacagcaacacccagaataacgtttcaccaaatatctgggcactgtggcgtggccaagccaacacataaaattaaccgtcatactctgtattattttcatattaatctcccagattaaaaatgagatagacaatatttacatattgtgtagagtcatttgtgtttctcccaatacttgctttgttcttatttgacttacaggagttctttgaatattggcttacaaacctcatatcaggtgtataagtagaaggatagtggccttttactttgttgattgtaatgtttttcataggttatctctttttatgtgctcaaatttctcatcattttttgatgacttctacattatgtcatactgggaaaaagcctccttatttataagacttttaaaattacacaatacctacacaacatttattatttttaaaaacatttttgatcttgaatgcacctgccttttattcttgttacctggctgtaattcttcccagtggataggcagctatcccaacataatttactgaatagtccatcctttcctacagtggtttgaaatgaacctggatcacttaagtaggaagaatcctctaaatgtaatctaaaacaacaagatttcatcatttttacccatccttacccataatgaggaaaaacattaaagattcaaacatccagtgttggagaaggtgcaggggaagggattctgccatgtacagctggtggaaatgtaaattaccaaacactatcaggaaggtaatatgcaaatatctatcaacaatttcaaggcatacctctttgaactagcaattacataaattatagatctaaagattcatctaaccaaaatactcacacctgttcagatagctagctagctagctagatagaaagatgatagatagatagatagataggtaatagataaatttgcagaggcactgtttgttataccaagagaactgtaaactatgtaaattaatcctaaatggttacataaattataagacagtcctaaaatgaaataccatgtagccattagaaagactctagattggtataggctgccatgaaaagatcactaaagcatattgtaaggtgaaaaataaaatttcaaaaaaaatatggagtatgattccatttatgctttttcttttctttttttgagatggagtcttgctctgtcacccaggctggagtgcagtggtgccatctcggcccactgcaacctccgcctcctgggttcaagtgattctcctgcctcagcctcacgagtagctgggactacagacgcctgccaccatgcctggcttatttttgtatttttagtagagacagggtttcaccatcttggccaggctggtctcgaactcctgacctcaggtgatccgcctgcctcagcctcccagagtgctgggattacaggcgcgagtcaccgggcccagccccagttatgctttttttttttttgaaacggagtctcactctgtcgcccaggcgggagtgcaatggcgcgatctcggcttactacaacctctgcctcctgggttcaagcaattctcctgcctcagactcccgagtagctgggattatgggtgcacaccaccacactggctaattttttgtatttttagtagagacggggtttcactatattgcccaggctggtctcgaactcctgggctcaagtgatctgcctgccttggcctcccaaagtgctaggattacaagtgtgaggcactacacccggccccgtgtatgcatttttaaaccaaatatttgtatacgcacatatatggacataaacaaaatagaggtttcctctgggaatggagaagtgtcagggagaagtgaaacggcatttcacattttacttttgtaccgttgggtttttttaaaggctatattcacacattataatgcaactttttaaaattagagaaataataatgggaaaccattcagcaccttgattctgaccaagtgagagcagataaggcagcacagggattcaagctgcctggagacctccagggtcactgtgagggtggctggaatcatgggaataaataaatgatttaacatgctcaggcttctaagtgcccatccccggggctgcggaggagcgaggtgcttaaaccgttcccaagcctcaggcattgaaagcaggagtgttttctctaagaaggagggtgctgtgctgtaattgacctctttggcattcagcgtctgcacgacatccagtgcagctctgggccggcggaagagaccaggctgcttgtgctgggaggggccgctgcccaaggacaagtcctgtactcacagcaacgctgaatcgcagtcctgggccatctggccccggcctcataatcactcttctgtcatgaatactgaatgaaggtaaacatacagtcacagggctgtcttggcagcacccaactttaaacctgtggcctatttctagctctccactgtgctgaattctgtcaaaaacaaacaaataacatgctaaaactattttgtgaacattacttatttcacattaagaatgttgctctgttattgtttttttttttttttgagatggagtcccgctctgtcgcccaggctgaagtgcagtggcgcgatcactgcaacctctgcctcccgggttgaagcaattctcctgcatcagcctcccgagtagctaagattacaggtgtgagccaccacgcccggctaattgttgtatttttggtagagacagggttttgccatcttggctaggctggtctcgaactgctgacctcaggtgacccgcccacctcggcctcccagagtgctgggattataggcgtgaaccactgcaaccagccaacagcatggttttggtcacctcaaatgaggacacgaatatataaatctcacggttttggtattgcatcatatttttcatacactgggaaacaaaaaatggaagaggtgtaggctgtcctgacctctgaaaggccctgaggggacagtggccatcttttggtttcctggcttctgaaccccttctgtgtttagggaactggccaagtatgagccttgtgaggaggcagagcccatctcccactagagaagctactgatgcagggaccttgttttccaagcatccctgatgcctgcgtttagccaatcaggtgcacctgccccaaattctgaatctgaggctaatggcacaaaggaggaaaagcagaaaattatttctggcagtggcagtagtggtggcagacagaatgtggctctaggtcctagtgtgcggtggcggggggactcccacgtccttcctggactgagttaatggcatgacttttaatgtggccctggctgtgcagcttccttgattctagaagcctggttttccagccttcctggcacatctctgagctacccaatatcttatcattaaatccctaaatgagccagagttggtctctgttgctgcaattaacagcgattgctgagacacgagtccagcacaatgatgatgagcaaggaagcctgcgttctgttgagagatgtgcaaaccattagtaatcagaaaaatgagactacactaaaacggcatggagacgctacttgatatccatgtgactggcaaaatctcaggtgctggataatgccaagagtgggcaggggtgtggctcagagatccagttgccttgcagctggtggctatacccttttcccttttaaaaaatttgttttctcggctgggcgtggtggctcgcgcttgtaatcccagcactttggtagaccgcggcaggtggatcacttgaggtcaggagttcgagaccagcctggccaacatagtgaaaccctgtctcttctaaaaatacaaaaattagccaggcatggtggcagccacctgtaggctcagctactcgggaggctgaggcaggaaaatcgcttaaacccaggaggtggaggttgcaatgagccgagattgcaccactgcactccagcctggtgagagtgactctatcaaagaaaaaaaaaaggtttgcttttttacatttttttctctttttttaatttttaatttttattttttgagacagtcagtagcctgggctggagtgcagttgtgcaattgtagctcactgcagcctctacctccgggctcaagtgatcctcctgcctcctcctcccaagtaactgggactacaggcacatgccatcacgcccagctttttaatttttattttgtagagacagggttcttgctgtgttgcccaggctggtctcaaactcatgggctcaaatcattctcccacttcagcttcccaaagtgccaggattataggtgtgagccacagcacctggtccctttttcttttttatgtctatttgggtcccatacactcaacagctcaacagaagaaagggctgtggctggacagagtgggccatgccgcttgcctcttacaggaactatcgccttaatcactttcttcttgcttttaatttattttttgagtaacattaaacattcacacacatactcacatacttagaaaatttcttcaacagcagaaaaggatatacggggaaaggtgagtttccctcccgcgccaacgcccagagccccttcccagagacagccgcggagaataggttcatgggtgacccttccccaagtcttttcctcactcagcatccagatgggtccttcggaaatgtgacacagattacggcacaacctctgccctccaggggcttcccatcattctccggatatcattctacatcctactgtggcgacaaagccctacgtgagctggacccagtcgcctgcccctgcctcattcccacggctctcccccaccctgtccccttgcagcctctctggcctccccggcctcctctgacaccccatggctcatctcatgacttgctgtacctctgcctagaatgtccctagagcctccgactctcctgctggagttctctccttaaataccacctcctccgagggccttcctgggctgcctgcgccgccttccttcctctgttctcccaatctgaggcttcctacccgactccagcccacagccccaggctttgtggtaatgtaactgttgtaaacttaaaattctggccgggcgtggtggctcatgcctgtaatcccagcactttgggagttcgaggcgggcagatcacttgaggccaggagttcaagaccagcctggccaacatggccaaaccccgtctctactaaaaatacaaaaattagctgggcgtggtggagtgcgcctgtagtcccagttactctggaggctgacgtgggaggatggcttgaactcgggaggcagagggtgcagtgagctgagatcacaccactgcactccagcctgggtgacatagcaagactctgtctcccaaaaaaaaaaaaaaaatcctaagcccccccagtgactgaacagactccctcttggccaaggggaccccagaaaaaccttaaaacttgagttcctggccatgataggatgggaggtcagacatgcctcattatacgtctttaccttttacagttcagacactgaccagcattcatgttaaaatagagatcataagactgacagaacggaccctttatggaagtaagataccaaattataaatagaactaaggtcatgccaggcaagtggtaagtcacgcacctctacacttaaagaataacttatgctctaactgccacgaggcttttctttttctctagcagataaacaagcactggcctcaggataagcagtgttgaaacatttggaagctcctgcagatgctgaataactgacctccagcctctgttccaccagccacaactacagctttgattggagaagagactgatttcagccactttctcctggtaagaagaacagggactggtcctggctggtttacagaggttgctcacaggttgccttcctgtcttgaaaataccttttgatatttagggcctaattgtaataacatttaaatgctaagtctccactccaaggtgaacataggttggttttttgtttatttgtttgtttgttttttgagacagagtctcattttgtcgcccaggctggagtgcagtggcgttatctctgctcattgcgtcctctgcctcccaagttcaagtgattctcatgcctcagcctcccaagcagctgggactacaggcgcgcccctccgcctggctaaattttagtagagacgggtttagccatgttggccaggctggtcctaaactcctggcctcaagtgatttgcccgccttggcttcccaaagtgctgggattacaggcgtgagctactacacctggccaacataggttgtatgttacatgcatatttgttcaatatgcatgtgtcatgactacctcatgaatattcatagcttctcctgtaatctgttgaatatgtatgtttagccaacccattcagtataaaactcctaccccaaaccctcttccttcgaagtacctgtctctggtcttggccgaaggcacacttcccagcctgtgggacagccaccttgcaggctgtaaccctttataagaaataaagttttcgtcaggcatggtgctgtgtacctgtagtctcagctactcaggaggctgaggtgggaggaccacctgagcctaggaggttgtggctgcagtgagctatgattatgccactgtactccagcctgggcaacacagtgagatcctgtgaaacaaaggaaagaaaaaagaaggaaggagggaaggaaggaaggaagagaaagagagagagaaaagaaaagaaagagagagacagaaagaagaaggaaaagaaagagagaaaggaaggaaggaagaaagaaagagagagagaaagaaaaagaaagaaagagaaagaaagggagagaaaggaaagaaggaagggaaggagggagggaggaagggagggagggacgggaaagaaaagagaggaaggaaggaagaaaggaaggaagaaggggagggagagagaaagaaagaaggggagaacagaagagaaagaaagaaagagaaaaagaaaatcagagtctcctccccttttctacatgtataaattctgtgagttttaagtaatcactattcatcaatctctggcccatcttgctgcaatggtcagctccatggagccaggccttgtctaccgctgaatccccagcaccggcgagtgctgtgatgggggctactcaggaagtcctcgctgaatgggtgtggagacgcatggccatcctcatgccttgcttttttccgctgaacagtacatgtcagggcctgatctacattggcatacgtggacctgcctcgttctttgtaacaggtgtgtgggattcctaccatgtggatgctccatgatctttatttaaccagagcctttactgatagacaggttgctcccaattttttattatcacaaaacaaacaacaaacaaaaaaaaaccagaaaagtatatccatacagtaaatctgtagatatcagcttcttggatcaaataatatggaatgtttcattttggtttttttgttttcttttgttttgttttgtttccttttttttctctatttttttgacacggagtctctctctgtcactcaggctggaatgcagtggtggaatctcagctcacttcaacttcctcctcccaggttccagcgattctcctgcctcagcctcctgagtagctgggatttcaggtttgccccaccacgtctggctaatttttgtatttttagtagagatgaggttttgccatgttggccagactggtcttgaactcctgacctcgagtgatctgcccacctcagcctccctaagttctggaattacaggcgtgagccaccatccccggccggggtgtttcattttgaaagatgtcatcaaatcgcagtccccagagaaatccccagagaatcgcagtccccagagtcacagggagatgggagaaaagagaagcagatgaggccagagagtgctgcagacagaaggcccgtggagcagaacttgcaagttctgggaggactctagctttgatcagagaggtggggagcctctgtggggttctgagtagggaagagacgtagcctacttatgtttttatttatttatctattttgagacagggtctcactctgtcacccaggcaggagtacagtggtgtaatcacgactcactgcagcctcaatctcctgggctcaagtgatcctcccaccttagcctcttcagtagctgggactacaggcatgtgccaccacacctggttaatttttttattttttgttgagacagggtttcactatgttgcccaggctggtcttgaactcctgggctcaagtgatcctcccgccttggcctcccaaagttttgggattacaggtgtgagccactgcacccagccctgcttatgtttttataagaccattctggctgctgcgtggtgtgaagtagggaaccagagagcagatgctgcagagacacagctgagaaagtgctgagagcctggaccagggctgtgctaaaaagtggctggattggggagctattctgaagacagggtggaaaggatttgctgatggggtaaagagaagaatcagagatttctcagggcctgagcaactggaaggatggggtggcagagtctgtgtaattggggccctattcccaagatgttggcaccatgggcctgtaggggcagcagctggtggaggggaggcatctgggaaacttccctttcccaccagatagggtttcctgatgttagcctgtcagggtggtttcaaaacaggtacagctgggctgcagcaggttgaactgtaaggaagggccagcctacaggcaaatgagggcagtggctaactcaaatcctgtcccccggctaggcccacactcttcctttccctccatttcccctgttggtgcatgctggtgaccaggtgcccaggtgcccatacagctggagacatctgcattcccttgctttttttttttttcctttttcttttttctttttgagactgagtcgctcactctgtcgcccaggctggagtgcagtggtgcaatctcagctcactgcaacctccgcctcctgggttcgagcaattcttctgcctcagcctgctgggtagatgggattacaggtgccagccatcacacctggctaatctttatatttttagcagacatggggtttcagcgtgttggcaaggctggtctggaactcctgacctcaagtgacctgccgcctcagcctcccaaagtgctgggattacagcactttggcatgagccactgggcccagctttttttttttttttttaaagaaatggagtctggctctgtcgcccaggctggagtgcaatggcgtgattgcagctcactacagcctggaactcctgggcttaagcagtcctcccacttcagcttcctgagtagttgcaaatacaagcatgcaccagcacactcagctaattttttaatttttttagcgatgggctaccgctatgttgcccaggctggtctcaaacaactgaattcaagcaatccttctgctttagcctcccaaagtgctgggatttccagcatgagccaccacatctggccccctttcatcttaaaatgcttcccattctgttttgggtgccccatatctgacctttaccctatctgtcattgcgggatgctgacaaggacagtgtggctcaatgtgggtttctgttgtcaagataccacaagggcatggaaccagaagggggctgtcagtttctgactggctgcagcagcttatcagaacgtatcacagatcaggagaggacgatatgatcaacggatgaggtaaccatcagctgagggcaaacagctcctaactaaagtcagcactttacagctggctccagtgcactctccctgtggctgcaggcagagcagccagggcccctcctccagcctcctcccacctcagagcttcagagcttcagacatccttggtgctgaggcctaggttccatgaggtcaaagggagaattcaggccgggcacagtggctcacgcctgtaattccaacactttgggaggccaaggtgggttgatcacctgagctcaggagttcgagaccagcctgaccaatatggtgaaacctcatctctactaaaaatacaaaaattagccaggtgtggtggtgagtgcctgtaatcccagctactcaggaggctgagtcaggagaatggcgtgaacccaggagaatggaggttgcagtgagccgagatcgcctctgcactccagcctgggcaacagagtgagactctgtctcaaaaaaaaaaaaaaaaggagaattcagactaagctgttttgcagcatcccaaggctgtgttgacctcacgtacagctgcatcatgggagtgggcggtgcgacatctcaagtccaactcaaccgagccatggttcaggctaagttcccgctggtgcccctacctggaacgctcttcagatagtggctccttctcacccattcaaatgtcccaggcctttcctgacaggccctgcccatctctctctctctctctctcaatttccctgcttgctttttgttgttgttgttgttgttgtttgatttttggtccttttttttttttttttttgaggcagagtcttcctctgtcgcccaggctggagtgcagtggcatgatctcggctgactgcaatctctgcctcccaggttaaggtgattctcctgccccagtctcctgagtagctgggattaccagtgcccgccaccatacctggctaatttttgtatttttagtagagacagagtttcaccatgttggccaggctggtctcaaactcctgacctcaagtgatgtgcccgcctcagcttcccaaagtgctggggttacaggcatgaaccccaccacgcctagccgatttattttctttcccttttttttcccccagacaggaccactggattggagtggtgccatcatagttcattttaatttccaactcctaggctcaagtgatcctcccgcctcagcctcctgagtatctaggactacaggtgtgcaccaccatgcctggctaattttttatttttatccttttttgtagagacaggggatctcactatgttgcccaggctggtctcaaacacccagccttaagcaatcctcctcctgcctcagcctcctaagtagctgggattataggtgtgagccaccatgcctgactttttatctcactttttgtagagacggggtatcgctatgttgaccaggctggttttgaactcctggcctcaagcagtcctcctgcctgggcctcccaaagcgttgagatcacagacgtgagccaccttgcctggcctacttcctttcttcctgtaaaattgccttgttggtttgtctacttgttttctgttcatcctgttcactcttgtctccagctcctagaacagtacctcacacagagtaacggctccatgtgttttgtgacagggaagcagacagtgtggcttgttggagaggagccacatacccccgccccccgattcatacatggtgtgactcagcccgaaccattgctcagttgagttggatttgagatgatgcactgcccactcccgtgatacagctgtgtgtgaggtcagcacagtcttggggtgctgccagacaacttagtttgaattctccctttgactcattggaacctagacctcagcaccaaagatgtccccataccagtaacccgggcaacagaatgcagataaaggacaggagacaaaaggcgcaggttctgacacattctttgcttgtgtcatcagctagcaagtattcacaggcacatccaacctccatccttacattccacaaggatttgagtgtctgttataggcaagggacaatgctaggtttttttttctaaaaacaaacttggggctgggcatggtggctcacacttgtaatcctagcactttgggaggccaaagcgggtggactgcctgagctcaagagttcgacaactcttggtaacatggtgaaaccccgtctctgccaaaaatacaaaaaattagccagatgcagtggcgtgcacctgtggcccagcttctcgggaggctgaggtgtgaggatcacttgagcccgaaaggtgaaggctgcagtgggccgcgattgcaccactgaactctagcctgggcaacagagtgggaccctgtctcaaaacaacaacaacaaaataagaaagaaagaaagaaaaagcggaagtgagagatggatgtgcgtgtagtcgtgtgggataattgcccatgggaaggaaacagaattcaacctcttggaatgtaggggg[136 bp omitted]atggtgaaaccctgtctacaaaaaatacaaaaattagtcgggcgtggtgttgcacacctgtaatcccactacttggaaggctggggtaggagaatcacttgaactagggaggcagaggttgcagtgagctgagatcgcaccactaaactccagcctgggtgatagagcaagactctgcctcaaaaaaaaaaaaattggactctgggtgaaataagtctgttggggacaaaatctggtgggagacccagaaggtcaagctgctttagaaagagctcaaccactgactttcctctttttgaccacatgactcttccaggtataaaagcctgccgttggtggaaaaggaaaaggtggtccagttagacaagatgccaccggcttctgaaaccagacatctttgaaaacccacccatctacctgcaggaaaaggcaagggacctgacctcgcctgggctcagggaagaggttgctgggatcataaccccaggaagagacgggatggaaggagagcatgcagggagcagaggacaggctactctccaaggaggagagggaagaggccacagaaatggaaaaggggccaggacaagtcagtggagagatggtcagggcctggcgaggaggagcaggacaaaagcggtggagctcagccccgtggcggcagggccactcccattcatctggtcctctacttctgaagttctcgaatgcagaatgagatgtacagatgggccagcaggtgatatgctatctgtcataggttaaggcctcattattttattcatttttaaacttttttttttttgagacagggtcttgttctgtcgcccaggctggtttgcagtggtgccaccatggttcactgtaaccttgaagcccctgggctcaagtgatcctcctgcctcagcctccagagtaacgaggactacaggtgcacaccgccatgcccagctaatttcttaacgttttgtagagaaaggctctcactgtgttgcccaggctggtcttgaactccttgactcaagcaatcctcctgtcttggcttcccaaagtgttgggattacaggtgtgagccactgctcccagccacaagttttattttaaatgtttacctttcaatgatcacttcgaggagatttaagcttactctttcttttttttttttcttgagatggagtcttgctgtgtcgtccaggctggagtgcagtggtgctatcttggctcactgcaacctctgcttcccaggttcaagtgattctcctacctcagcctcccgagtagctgagactacaggcatgtgccaccactccctactaatttttgtatttttagtagagtcggggtttcaccatgttagccaggttggtctcgaactcctgacctaaagtgatctgcctgcctcagcctcccaaagtgctgggaggcatgagccaccatgcctggctcattgtctagtttttaccaagaagatgatgagatatgccagagggctccgtatctgctatgagaacgtcccccaagagcagctggccgtggtgctgcagctggagctgtgcttggagctcttcttcacccccatggcggtcaccaccttctgccactggcactttgtgcagatcatgctctctggccccaagtggggacctggaggtgctgaagagccaagagactggctgccgtgaccctcttcaacttcctggtctgcttggaccctgtgctttgtctcccatggtgggttcccccagtggaagagtcaaattggtgggcaggcgcagtgttgttcagtgctctcgatgctgcattgaccccttgattttctttgtttttgtttttattttgttttgttttgtttttgagatggagtcttgctctgtcacccaggctggagtgcagtggtgtgatgatcttggctcactgcaacctccgcctcctgggttctcctgcctcagcctcccgggtagctgggattacaggcacccaccaccacacccggctaatttttgtatttttagtagagacgaggtttcaacccctactcaggctggtgtcaaactcctgaccgcaagtgatctgcccaccttggcctcccaaagtgttgcaattacaggcgtgagccaccatgcccagcctaaccccttgattttctgtttctcttcctccaccgtgcgcaaagcctttgacagagggccacggaggtggcagcacggcgggggtctcactgtctgggtggtggtgaaagctctggagagccagctgcagagagaagatgtggatcttagggacggccaatgtcaccttcacaggagattagaggcgccagcttggggtaaccttttggggaaggagggctcaaaaagaggaacaatgaaacagaactaaggtgagttctcctgtgcccagtttcagaggtcaaggagagtagtagatagctcaaacccaactcagccattgagtgagtgttttcattttgttccttggggtctatgatattttctattttcttttctttccttttgttttggtttgtttgtttgtttggttggttggttggttggttggttttagagacagggtttccctctgtcacccaggctggaatgcagtagtgtgatcacatcacactgcagcttctaactcatgggttcaagccatcctcctgcctcagcctcctgagtagctgggactccaggtgcacgccaccatggccggctaattgtttattttttatagagacagggtttcactatgttggccaggatgttcaacaacttctgccttcaagcgatcttccctcctgggcctccccaagtgctgagtttacaagcatcagccaccacacccagcctatgacattttcttcattatggctggtactgcctcatggtaagccacaagcctttttatcttgtaatatcagagtcttggaattctttatcttccctactctatatctagaagacagtagcactgacttatctgctgcagagctcttaattctatccttggccccgattcagaaaagggggttcctcatgctggatctgaacaacccagcacaggcaagtctggggagcaaggcaggagcctgcatgtggactcaaaggaccggcacccgaaacaaagcagtggctggcacaggtggacaaaccaggcaagaaaagcaactgtccttcggagcagagtccacgtgatgggaagaaacaggtcatgatacttttgagtggttacatcctactgtgtttgtgccttcttttttcctttctcagtcttgccaagagacccattaatttgtcttttcagaaaaccaagatcctctccagcatttatctttgttttcttgttgcattgatttctaatcttatctttattgtttccttccttttactttattgagtcttctctgttgctccttttctaacatgttaacttggatgctcgttcattttagcctttcttctttgctaatgtaagcatttagtgtgttggatagatttccctctaagaacagctttagtgggatgtcacaagttttgatttgcagcattctcattattttgagttctaaataggctccaaattccatgggatttttttatttgactcttgactttggaaatgtaccttaattttcaaacacagatgtttcccccctttatccttttgttattcatttctaactacagagtattgtttcaatggtatcagttctttgaaatttgctgagaattgttttttggcttagaatataaacagtattctagtattccagtaatgaaaagaagatagattctgtaattgttgggtgctatgttctctgtatataccttagatcaaacttgttaatttatgatgttcaaatcttcataacctttatatacattttcatctatttaatctatcagttatatgaagaggtgtgttacatgctccttctatcatggtaaatttgcctatttctccttgtagttctgtctccctggtgaattgaaactttcaaaattctttctgccttaacattgattttgtctgatattaacagagccacatcaacttggtttttgcttattatttgccagtccatctctgtccatccttctacattcaaccttgctatatctttatgttttaaatgtgcttttcctaagcagtgtatagagtggttggatttttttgtaatctggtctgacaactggacaatatttgtcttttaactgtaccattttgtccatttatagttataaaataataatttccaatatatttgaatttatctctgtcatcttattttaaatacttttagtgaagtatgtgcacatatattgaaatatacatgcataccgtgtgtattagtccattctcacgctgctagtaaagacatacccgagactgggtaatttacaaagaagagaggtttaattgactcacagttccacggggctgggcaagcctcagaaaacatagaatcatggtggaagggaaagcaaacaggtccttcttcacatggcagcagcaagaagtgcagagcaaaatgggagaagccatctgataaaaccattagatctcgtgagaactcactcactatcaggagaacagcatgagggtaacccaccccatgattcaattacctcccacctggttcctcccatgacacttgggattatgggaactgcaattcaagatgagatttaggtggggacacagccaaaccatatcaccatgcatggccaaataataagtgtacaggccaaataaactatcacaaatatcacagagtgaacacacctatttaagaaaaagcaaaaagtctaccatattattttgtgctttttatttccctcatcttttattttattttattttattttattttattctattttattttattttcagacacagtctcactctgttgcccaggctgaagtcaacggcatgatctcagctcactgcaacctccacctcctgggttcaagcaattctcgtgcctcagcctcccaagtagcttggattacaggtgtgtgccactatgcctggctaattttggcatttttattaaagacggggtttcaccatgttgaccaagctggtcttgaactgctgaccttaggtgatccaaccacctcggcctcccaaagtgctggtattacaggtgtgagccaccttgccaagccatccctcaccttttaatatttctttttttcttctctctagccttcttttgagattcagttcgtttatttcttttctttctcatttcatttattcctccactgacttggaaactgtatgttctgtttccattatttagtggttattttaaacactgtaagatggtaggagttcctcaatgagttactccctccctcccttccttcttccctttaataccacacatcaaggaaaacccaacccaagtagcttcgaactatgtgaatctagggcagcagttttcaaagcactgtctgtgaggtcaaaactattcataatgctattaaaatgctgattgctctcttcaccttcattatctcacaaataatgtgcacagtggaggttttgagagctacgtgacgtgatatcatgacggaatgaatgcagaccagataggaaaatacagctgtcttctattaagccaggcattaaagagatctgcaaaaatgtaaaacaatgccactgtcacgaattttttgaagatatagttgttttttctaggaacgtgtcatttatattaacatgtaatggttttatggttattattattataagataagttaatacacatttttaaatttttctgttttaactttgttttttttttgttttttttttttgttttttttgatacgcagtttcactcttgttgccaaggctggagtacagtggtgtgatctcggctcaccgcaacctctgcctcctggcttcaagcgattctcctgcctcagcctcccaagtagctgagattacaggcacaagccaccatgcccggctaatttttgtatttttagtagagacagggtttcaccatgttggtcaggctggtctcgcactcctgacctcatgatctgcccacctcagtctcccaaggtcctaggattatagatatgagccaccacgcctggcaggaattttcatttttgcttttctttccttttttttcttttttcttttttttttcgagacagtgtctcactctgccacccagggtgagtgcagtggcatgaacacaactcactgcagcctcgtcttcccaggctcaagcaaccctcccacctcagcctcccaagtagctggaactacaggtgcacgccaccatgctcagctaattcttgtattttttgtggagatggggttttgccatgttgcccgggttggtctcaaactcctaagcttaaagcaatccacctgcctcagcctcccaaagtgttgggattagaggggtgagccaccacacccatcccttcagtaattttcaagagtataaaccgaccttgagatccacaagtttgagaattgctgacctggtgagatgacagacaggattactctgctaagtgcaattgtgcacatataaaaccttctgctacctgatgtgtctttaatgattcgaaatttcataaagtctaatgccacttaacctctcaaagtgagtttaaagtttgcctgataaaatgcaaagcttgttgagatattaaatatgatacttaacaatcagaactattccatgaggagataaagaagtaacaaagccggctcagatggatgggatgtaattgcgccgcacagacctgtattcaccatgttatgttagttcctgttctaaagatgctttttttttttttttttttttttttttgagacagagtctcgctctgtaacccagactgctgcagtgcagtggcatgagcttggctcactgcaacctccgcctcccaggctcaagcaattcttatgcctcagcttcccgagttgctgggattacaggcatgcgccaccacacctggcaaatgtttgtatttttagtagagatggggtttcaccatgttggccaggctggtcttgaactcctggcctcaagtgattcatcaacctcagcctctcaaagtgctagaattacaggtttgagccaccgcgcctggcctaaggattgtttaaattggagtttttcttcttgttttatggggaaggattacttcatctacaattaggtggaatattaacccaaactatatgtaggatttccaatcttagaggctataggaactgggggagaaggaaagcataatactaattatatttgtcctatgtcatcctagggaaagtgcatatttaattcctgtcagcaaagattaaagaaagattttcagggcaaaagttataaacaggcttagtgtgttttattttgaacgggggaattcacaaagcctttgtgaaagcctcaattttactgttagactacttgatagcacctagttaatataagctagggcgattcaactagttccattgcacctcccggtaaataaatggttcctgaggcattgtgttaagcgaggaatggaagtttgaaggttaccggcaaggctccttcagccctctccggttttcaggttaatggtggggagagtgagtgtccaccagaaagggactgtgatgtgacgttaggtcacttgatttctgtaaacttatgggagacctttctcctaaagatgggctcaagatgccaccatttacaatgttactctcaatgaccttggggaagtcctgctcctaggggtgggacacagtgataagagggaggggtgtgccgggcatggtggctcatgcctgtaattccagcactttgggaggctgaggcaggcagatcacctgaggccaggagttcaagaccagcctggccaacatggcaaaaccccatctctactaacaatataaaaattagctgggcgtggtggtgtgcagctgtaatcccagctacttgagaggctgagacaggagaatcacttgaatccaagaggcagaggctgtagtgagccaaaatcatgccattgcactccaacctgggcaacaagagcagacactccgtctaaagcaaacaacaaccaaaaaaaaaaaaaaaaaacacaagaggaaggggtggaagagtgtactgattgttggaccctgaggattgcaattttatcataacattctctacagtctcttttcaaaaatgaaccagcaatcagagatggcaccgattggtttggccttcttagcaacatctctcccttgtcctctgccatgtggtttggtggagctgactttacccccagctcctgctccaggggcaggtgtgaaaccaggaccctgctcatctacagttcatcctctgaccacagtgatggttcacacttgggtgcatgactcaatccagaccaatgaaagatgaacccaggctgggcatggtggctcacatctgtaatcccagcacatgggaaggctgaggcaggcgaatcagttgaggtcaggagtttgagaccagccaggctaacttggcgaaaccctgtctctactaaaaatacaaaaatgagctgggcgtggtggtgcacacctgtaatcccagctacttgggaggctgaggcggaagaatcacttgaacacgggatgtggaggttgcagtgagccaagaccatgccactgcacactccagcctgggtgacagagtgcacccactgtggatccagcctttttttttttttttttttttgagacagagtctcaccaggcttgagtgcagtggcgttaatcttggctcactgcaacctctgcctcccaggttcaagcaattctcctgcctcagcctcctgagtagctaggactagaggcgcgcaccaccccgcccagctaatttttgtatttttagtagagacggggattcaccatgttggccaggatggtctcgatctcttgacctcatgatccacccaccttggcctcccaaagtgctgggattataggcatgaaccaccgcacctggccagcccttctcttttaaccaccaggagaaagaacctctcttctactgatcttgaacttgaaggctggtccctctcttctgggggccattgtgaagagaggctgcctaagcctgaagtcaacttaaaggaaggtgaaacagagaaaaaccacacattcaggcatttgatgtcctaaagcagatctactctggggatttttagatttgaaaaccaaatattctccttccttagcttaaagcaagtttgaagctgagatggacataatgtaattgctctgcacaagcctgtatattcattgctttatgctcatccttgttctaaagattagccttttgcccattttctaattgaattgcttgattgtgttttgttttactattgagttttgtgagacatttatttagagtgtctcgctctgttgtccaggctggggtgcagtggcatgatctcagctcactgcaacctccgcctcccgggttcaagtgatcctccctcttcaacctcctgagtagctgggattacgagtgtacaccatcacacctggctaatttttgtatttttagtagaaatggggtttcaccatgttggccaggctggtctcaaactcctgacctcctcaagttgatcagcccaccccggcctcccgaagtgttgggattacaggcgtgagccactgcaccagccaacactgagtcgtatttctttagatttttgtgattgatgttcccattatgcttctctctcactgaatctcctaccttcttcatcagaggcagcgtcatactggactttaagtgcatccttcctgtccatgattttaaattgtaccttgcaaatatactttgcacctaaacactgtttagtattcttttgcgttttttcaaatatccataaatacctatagtacaagtcattctgcaactagctactttctaccccaaatcatccctttgctatctggcctccatcactaaaccttacatatctcattgatttattttgtctgctctagcagtccatcatattaataagacgagttttattttttccattctactattgatagacatttaaatcacttcccattctttgccagcatgacaatgctgctttgaacatccctgtgtgtgtctcttcgcgcacacgtggaagagttcttccactggtaggcacagcatttgcattctccatttcagtaaaagctgccaaggtcctcttcaacgtgatggcgtaaatccagctctttctgcaagaaggctcaccagccttcccaccagctcttctccccaccccagccctgcagccctgcagcctgaccctaggtaatgagtggtggggagtgacccaggcatgcacgacctgcccagaggaaagggagttcaaagaaggacccgagaccctcacaggaacctagcagattggcacaagtgccagatgtatccaggacagacactttccccaggactccaggggtaaaggagtgccccacctctccactccttgcctttcttaactgaattcagattgtcgtgaacattcaagaaaagcattgtggctgacttccaaggttactacttgagtccatcactacagcagttactactcttactgctccagaccgtcattacagcagttactactgttaccacttgagaccatccttacaagactgaaggaagggaggaacgtagaaatgaaaaccaaggaaaaaaagaaactgctttaagtaaaggctagcatggggaagaagagagctccccgcttctagtgagcaaaggcagcccccttatttattgggtaacaagagcacgaggaggtggcaacaattggtcagctgcttaattgatcagaggttcatgttgttactgacaggcttctattatgcctaatcataagaaacatttgttcagcttccaacaaagctgaagtttaaatgatgcaattacattcagcacagaggagtatctcccccaatcccaccatataaagagaaagcacatgcatgcaggagagaaacagtgaatggaaggctaggaaatcttggtcttggaggagagtgcagattggagatagagggaaggggaaaataagatgctgggatcttgagggaggatgtggggtggtggccaagctccctggttcatggggatgagaatgaagcctctgttggctctgggtcatgtgacatgggccaagataagacatggttcctgcagagagatggagcgtggtctgtctgtcttgtgctcatgtgtctgtgtcaaatggcttccgagggaactagagccacttaggtctatgtggtttaaggaaagcacaagtgaaaagaagccaggaatagtgcagaggtaggggatgggacaccaagacatgaggccagagtgtgagacagaatcagagctcctgcctgcagagaatgatgggctgtgtgaggagccctggccctctgcggacattttaataagtggccccactttcttaggtgctcatgtgtccggggattctagggaggttttgtgaggctgagctaaaaaaaataaccaattccagctaggcacaggggctcacgcctgtaatcccagccctttgggaggctggggtgtgaggattgcttaaggccaggaggtcaaggctacagtgagccatgattgtgccgctgcactccagcctgagcaagagggtgagaccctgtctcaagaaacaagcaaacaaaaataacctattccactttgaccctgaatagggaaaactgaccaaacaaggagagtagccagaggcagggatggaagcataggagaaactggcagtggacaagctcctttggaataatccaccaagagaggaaatgaaacagaatgcctgaatgaattatgaaagcagaacaaagtctgaaagaataatcagggcttgagatctagaaaggatcaatgagatttgtgggaacagactttcaggggaaacacagagggctaagcggcctgagaaacagctcaactcttgaccttcctcttcctgacacatagcaagctcaagtgtaaaagttcttggttcctgggggatcccgaaatggcagaggtggctgtatctatgcaccttattcaacaagttggtaaaagtccacttaaggctgatcaccaagagctgcctgcttagaaacaggaggaagctagatacctaaaatactcccagcacgtcctgggagatgacaccctaagctctcacctgggaaaggaaaaggatgagagacccaggtgactgcaggttcaccttgctggggaacaaggttttctcaccttcatttccagtgcgggagggaaaccagaatagcaaaagatcaagaaaactgaacaaaaactagaagagaaattggtggagggatgacagaggttgaaatgggaaggcaccaagcagaatcaggtatcctctacagagcagagaattgccctgagcacagaatgctatatcattttctcaaagtcacagagctgggaattgccaacagtgggactgggatccagatctgctcccctcattacttattctccctggatttctcttcagagtggagcaatgccctggcattcaactcgtctgtgatatgacagtcctcacactctgtgtagtgacctactatgagtggtacctgggcgctgcctgcctagaattcatccctccttcttctggtagcagcatcccaattttcctctagttaaccactccccctctactcttggtctgtgggatgtggggagggggacagggggagaaggggaggttggccccattatcactgcagggcatgcaacccagacttggcaatctcagtccatctagagtcaatcttttctagactcttctagactaattcagaaagcagctttctctttccacagggtggttaggaaggtagaaggtaatcctggagcttcccgccaccacgcaggaggaatttgcctgagagcaaagccagcatagagaagcagagctgagtcatggagacaggtggctgaaagtttcatttcggcatatggatctcaccattcctgaagccactttcaactcttcaatttcatagctaataaattctcatttttgcacaattagctgaagcaaggttttttgttacctggaagcaatgaatgcaaatgttttttaggtaatttgttaatagtaataaaagataaagaatataataataaagaataggggcatttccagggccgggcacagtggctcacacctgtaatcccagtactttgggaggccgaggcgggcagatcacttgaggtcaggagttggagaacagcctggcaaaaccccgtctctcctaaaaatacaagaattagccaggcgcagtggcacacacctgtaatcccagctacttgggaggctgaggcaggagaatcgcttgaacccgggaggcagaggttgcagtgagtcaagatcacaccactgcactctagcctgggagatggagcaagactacatctcaaaaaagaaaaagaataaagtcatttctgaattgtatcttttatgattttaaaaaatgaatcagagaagattcaaggcacattctgacatgcaagggttacagtcacagcccatgggccaggcatggcacttcaccccagtatgctggcgacggccctctctgcaccaataaatcagatgcctgcttaacaactatttcaatcagaagtgcattctgcagttttgaaagtttccacacgtattatcactcctcagtcataaaacaatctgatgaagttagtttctaatgccttttttttttttttttttgagacaaagtctcggtctgtcacccaggccagagtgcaatggcatgatcttggctcactgcagcctccgcagttcaaacaattctcctgcctgagcctcctgagtagctgggattacaggtgtgcaccaccatgcccagctaatatttgtatttttagtagagacggggtttcaccatgttggccaggctggtctcgaattcctgacctcaaatgatctgccaacctcggcctcccaaagtgctggtatgacaggcctgagccactgcacctggctctgaccacacgtcttccatcaaggacttacatcattctttttggccacccagaacctctgaactccctgcctgtgaatctacgcctgcccaagggagaagcagaaacttgctttctcagagtcggctcccatgtagggcacaggcatgtgaccaaagtccagccagttaccaagcccaggtgggggcagtgcagcatagctgtgacgttaggcccggaggccactctagggagctggcagcacacagccagctgccagggcggcagagagaggtgccgagggtgtggcagcagtgcccagcgtgtgaaccgcagagtgtgcgccagtggtggaggtggtggtgtctgcaagggtatcatccaggcataccctccaagcctggtgttctggctggcctggagattccacaagctacctaataccctttaaaaacaaaattcctaggctgggtgggatggctcacgcctgtaatcacagtgtctggggaggccgagatgggaggatggctccaagtgagaggatctctggaggccaggagtttgagatcagcctgggcaacatagtgagatcccatctctataaaaataattttaaaataaaataaataggccgggcatggtaagctcacacctgtgatcccagcactttgggaggccaaggcaggcagatcacctgaggtcaggagttcgagaccagcctggccaacatgatgaaaccctgtctctactaaaaatacaaaaattagccgggtgtgatggtgggcgcctataatcccagctacttgagaggctgaggtgggagaatgcttgaacctggaaggcagagattgcagtgagccaagttcgcaccactgctctccagcctgggcgatagagcaagactccatctcaaaaaaagtaaaaaataaataaaataaataagaacaaaattccttttccgcttaacctgacaagaggagagtctgctgtctgtagtgggaaacctgacagatacaatcaggagagcatccaaggtctccaggcggacagtcctctgcagctgcatcctgtctgtgccattggtccctctgccagcctcttggccatgtgtgtagcctgggaagaatgctgccctgctccacctgctgtggcaactgccactatgcgagatggccaggctgctccagctcccacagtggctcgtggtctgtgcctccgtcagtctggcttctcctggggcagcggctaccggctggactctggcccaggaacagggctttccctgtgctcgcctgcacctcgcaccatggtcctggccccacgacgactgaatctgccagtctccactcccctgtgcactttctgcactacagcagtgggatgtggtgacaggaacactaaaggattgaatgccgggatcctggagggaaattgaagctgctggtgcttctgcctgggtcctaggggagcaggaaacactgtggagtacttactgtgggctcagcacagttccattttaattgacaaataataattgtatctatgtatgggatacaatatgatgttttgatccatgtttacaacgtggaatgattaaatcaggccaattaaacacatccatcacctcacatactcatccttttcttgcagtgtaaacatttaaaatctcttttcacggctttgaaatatacattacattattatttattataaacaccattatgtgcaattgatcactaaagctgactcctcctaactgaaactttgaagtcttcagtcagcgtcttccctttccccatccagccccttcccccagcctctggtaaccagcatacttctcgccatgagatctgcttctagatcggctttttaagattctccatgtaagtgagatcatgcagcacttgcctttctgtgcctggcttatgtcgctgagcagaaggccctccaggctcatctatgctgccacaaatgacagggtttctttctttttcaaggctgactagtattccactgtgtatctacaccacattttcttttcttttctcttttgagatggagtttttgctctgttgcccaagctggagtgcagtggcacgatcttggctcactgcaacctccacctcctgagttcaagtgattctaccacctcagcctcccaagtacctgggattacaggtgcccgccaccacacccgtctaatttttgtatttttagtagagatggggtttcaccatgttggccaggctggtctccaactcctgacctcaagtgatctgcctgcctcagcttcccaaagtgctgggattacaggtgtaagccaccgcgcctggcccacattttctttagcgattgacctgatgatggatatctaggttgcttcctcatcttggccattgtgaataacactgcaatggacatgggtgtgcaggcatctctttgacatactgatttcaattcctttggatttacacccagcagggggatttctggatcatatggcagtgctacttttacttttctgaggaaactccgtactgttttccataataactgtattaatttacatttccgtcaacagttcggcgctatttcaaaggtttcctgtgctctaaagcactctattaggctctcgttgcagggatttggggaaaaaaagacactcccttgtccagagacatggacacctgctcgcatcccaatttgcctgtcattcactccttcatcaactgctcccggccaggacttgttcaagctgctgagaatgttttggtgaacaagacaggaagcggcagctctcgtgaagttcgcgttctggaaaagcaccggtgttggaggaacagcggttggaccttttccggcctggaatttgggctccccacaaaggagatgcactttagatgattattacttgatcaaactaataaaaggcccgagatagttaataataatgaaagcgtggcttcctcctccctgtttctaggccaagaggtggcaaggggtagcaaattaaaaacatacatattggtttaacctgaaagtatgtctatgtgcacagctctttttgctaaagacagcaaaaagtttttactagagcaacctaaaaccaattctgtgacctgagtagcacctcttaccaggaattgttgacaaaagatgaataaatagaacaatttcagattctggtaaagcaccgtgaagaaaacaaattgattagtgtaataagaagaggggaattccttttttatatttatttatttatttatttatttatttatttatttatttatttttgagacacagtctcactctgtcgcccaggctagagtgcaatggtgcgatctcggctcactgcaacctccacctcccaggttcaagtgattctcctgcctcagtctcccaagtagctgggactctaagcacccgccaccatgcccgactatgcgtatttttgtagagatggggtttcaccatgttggccaagctggtcttgaactcctgacctcaggtgatctgcccgcctcagcctcccaaagtgctgggattacagtcatgagtgagccactgcacctgacctatttttatttattttttgatacagggtctcactctgttgcccatgctggagcgcagtggtgcgatcttggctcactgcagcctcgaactcctaggctcaagccttagccaccagaatagctgagattctaagtgtgcaccaccacccctttttttccttttttattgttataggcatgggggtttcagtatgttgcccaggttggtcttgaacccctggcctcaagtgatcttcccacctccgtctcccaaagttctgagattacaggtgtgggccaccacacctggcccaggactcctttagatggagtggccaggaagggctctctgaggacagacattggaaagatgacagagaggcagctgtgagagggtgtggggcaaggacgctccaggcaaaggcaacagcagagacaaagatttccacgcaagacaagctcagtgtgggctggagacagtgttaggagacacggtgcatccacagaggtctcctgcaggtgcactggagagacgtggcccagaagcagggcaaggtgtgctgggaaagagaacgtggaggtcagcaggccatcaattcccctggaaccacacctggatgaagccgaactagtaaaccttttccaagcagaagaaaagatctggggtccaagccaagtgatcccactgcccaaacacatacctggtgggtcttcacctggtgggtctgcagctgaaccctggagtgcaaatgaaaacccactaggactcaggataggagggaacaaatatgagagtagtcccaggtgtgatgaaggagtggacctaccgggagatcaaggaatccaggttaccatgaggaaggacaaacacaaaacacacagtactgactgtgtcccagatcctgacccaagacatttatttatttatttttgcgacggagtctcgctctgtcacccaggctggagtgcagtggcatgatcttggctcactgaagcctccgcctcccgggttcgagtgattctcctgcctcagcctcccaagtagctggaattaaaggagccgcccccaccacgcccagctattttttttttttttttttgagacggagtctcattctgtcgccaatttttgtatttttagtagagacagggtttcaccatgttggccgagctggtctccaactcctgacctcaggtgatctgcccgccttggcctcccaaagtgctgggattacagacgtgagccaccgcactcagctgcccaaaagttttagatacatcaacccattcagtcttcacaaaagcccatgaggtgggcactatcatttcctccatttagagggaaggaaaccacagcccaggagactacaggacttgtccaagcacacacagctggagggagcccagcaaggctggaatccaggcagtctgcatcccagtccatgcccttgcctgccactctacatggcctcacgagatgcctctccaggtacctaaatgtagaagtcaaaggaatactgtggaagcagccaaggtctgcatttgggaatccatacgttagattcgtggaatcagttctggagaaaaggtggaatttttcaggtttttttttcatagaggtaatcaactaccaactttccaatggacacagcccatctcagtgtgaaagcctgtccctagagcagagccagaggaggtacagccagctccgactctgcaacttcagtaaggagcaagaagatttctgtttagaggttaccactccactccccaacaaaaaatgagagtagagcaaggtttccaggcagctgcctatactccgggaaaggatgttggtggagaaggaatcgagagagggccacactgttgggggcaaggcaaggggctcactgccaagggacagacagaaccagggaaggcaaagatcacagaaagggaacgggagtgcagagcttctaatggagagactgcatgatgctctcctgggctggagctggggagctgggaacagctaaggtatgcccacaggcacagaggcatctcttctgccccttggaacttctgactcggaggctgtcaacattccctctcttgagcaggagcaggatgggagaagttgcagctagattgctttggagtctatccagcatttggacataacctgtcccttgtgtggtcactggaaagaagttaagaactgctcctaggctggacatggtggctcacacctgtaatcctagcactttgggaggccgaggcaagagcatcgcttgaggtcaggagttcaaggccagcctggccaacatggtgaaaccccctctctcctaaaaatacaaaacttagccagccatggtggcacatgcctgtagtcccagctactcgggaggctgaggcaggagaattgcttgaacctgagaggcagagggtgcagtgagccgaaatcacgccattgtactccagcctgggcgacagactgagactccatcttaaaaaaaaagagaactgctcctgtgtagagttcagttgaggccaggcacaatggctcatgcctataatcccagcactttgggaggccaagccgggcagattgcttgagcccaggagttcaagaacagcctgggcaacatggcaaagcctcaactccgcaaaaaatataaaactaagccaggcatagtggtgtgcgcctgtagtcccagctacttgggaggctgaggtgggaggattgcttgagcctgggaggtcaaggctgtagtgagccgtgatggagccattgcacaccggcctggatgacagagtgagacccggtctcaaaaaaaaaaaagagttcagttgtctggttacaactgcagaaaataacctatgtgtggtggtccattttcaattctaagtgccttaatataggtttaaacaggctacaaagagataaagaagcagaatgtactaagtcacccccccacccccaccccctcctgcccatcctgcttcttgctttccctttcatctagctgccaggcgcctatcagtcaggacctccttaaccatccccttccacccctccaaagaatttagttgggccaggcacagtggctcatgactgtaatcccagcactttgggaggccaaggcaggcagatcacctgtggtcaggagttcaagaccagcctggccaacatggtgaaaccccatctgtgctaaaaatccaaaaattagccgggcacctgtaatcccagctactcgggaggctgaggcaggtgaattgcttgaaccgggtgggcagaggttgcagtgagctgatatcacgccacttcattccagcctgggcaacaagagtgaaactccgtctcaaaaaaaaaaaaaaaaaaagaatttagtttaggctagcttgcaaagtaaataattgtactctttcttatcagctaagtccagtcactatggccataactcaaatgtttgaagagtcctgagacagttgcaatgcattatgggctgcaataaaatgcagcagaaagaccctaaagaacatactgaaatccttaacccaaatatcaataggtgacatgcagaaagattgtaacccaatagtactcagccagtgaggaactaggggagggacttgtgcacttgggaataaattgcttgttgaaatcgttgcaggtgtgcccgcatgccagacaccccatcttgcaaggcagccactaaggtctcgcttctgctgttctcccatccctaagtccattctttggtttggacaagtgagtgtgtttgttttttctttttctttttctttttcttttttcccttttatctagctgccaggcacctatcagtcagggcttccttaaccaccccctcccacaccaccaccgaggctgcagtgcagtggcgtgatcttggctcactacagcttccacctactgggttcaagcgattctcctgcctcagcctcccgagtagatgggattacaggcacccgccaccacacccggctaatttttgtatttttagtagagacgggtttcaccatgttagtcaggctggtctcaaattcctgacctcaggtgatccacctgccttggcctcccaaagtgctgggattacaggtgtgagccacggcacctggcagagtttgtttctcacacaatttacaatagaggagtattctgccattttgcaaagtgttctcacatatgttacctcatttattctgagagagagggaggattattgtgggaattggctcatgtgattatggaggctgagaagtcccatctgtctgcaagctggggaaccaggagagctggtggtgtaattcagtccaaatctgaaggcctgagaactgatgtctgagggcaggagaagatggacatcccaactcaatagagagagcagagacagaaaacttgctcttcttcttttttttttttttttttttttttgatatggagcgcctgccaccacacccagctaattttttgtgtttttttgtggagacagggtttcgccgtgttggccaggctagtctcgaactgctgacctcaggtgatgcactcagctcagcctcccaaagtgctgggattacaggtgtgagccaccacacctggcagagccaccacacctggcagagccactggtttttttttttttaattgacttatttttcttacatataatttagccttaccctaaacaaaaataaatattaataacagtaacagccagcaattctaagtacttgctatgtaccaggcatatacatacatacgtacatatgggattttttgagacagagtctggctctgtcgtccaggctggagtgcagtgacacaatcacagctcacttcagcctcaacctcctgggttcaatcaatcctcccacctcagcctcaaaagtggctggaaatataggtacatgccaccacacccagctaattcgtttgtatattttgtaaaggcgagattttgccctattgcccaggttggtctggaactcctgggctcaagcgatctgcccacctcggcttcccaaagtgctgggattacaggcataagtcactgtccccagcccagcccagtacgtatgtttatagacaactataaacatatgtatacacacaacatgtggttgtgtaaagatgtgtaatacacatacacacaaacatatacatattcatttcaatcctcacagcaaacctacaaggtaggtatattagtctcctcgttctacaaatgaggaaactgaggcccagagaaatgagtgcccttgcccaaggtgacacagccaacaagtagccgccaggactgcagcccacagggccagctccagattccacgcttttaacccctgaaatcatgagtttaatggcttagctacaggttaagtcacttgccagggaacccagagctagcaatgggatgggaactgagatgtgaatcccagtagtctaacctcaaaacctgcgtgtttagctcctacatgcgttcccacatgggttatggacagctctactaatggaagagggcgctggactggggtggaattgtgaaagaactagcgacgtggagagaggcttgaagctcagcctaaataaatgttggggacagcccccactgacagctggacttggcccgccatcttcccttcttggtacctctcaatctttcgtaaaaataaaccaaaagctgacgttcaccacttcatgccatgcaaacaactgtttttggttttgttcttcaaatataaaataacatgaaacatgctttgtcaatgtacttacccccatcccatcccacactctctcttcccaaatacccgcatcaccctccactcttcagagatactagacggggtggctcagcagggctgggaacaaacactggccaatgtaaaggcttctgaatactccgcagcactggagagtctgtcttcagcacgatcccctgttaaccctaggaaagatgtgcacgtgacaggggcggggtgcgtcatggaagcctgacgttcctcatgccagatcagacgggaaggctgtaaaagggggaaggtgaggccagctggcagaaagcaggaggaacgcagccttgctccaggttcgtactcccatacctgaaacgcctcctccttctcccgcctacccaggctgaacacctggagaggggcagggtaggaatgccccctaggtgaccagagtggagaggaggacactgaaggggtctaaggatcacgagaccgcgtgtggcttgacttattcgccaagtggagattcctcgatcatcctcagagcctgtggtcccttccatctagtcaagaatgggcaggaggccaggcgagacaaaactcaaggggaaagccgtactcatttttatcaacatctccttgccaggaagcttgtggtattcactcaaatccaggacatgataaacatttacagaaaataataaaagcagatgatgtgaggacagtcaagagacgcaaagtacacttatgctccccctcctcatctagaaagtgggtctgcatggagtgtaacagcagaatctgacatagctgactccaccctgcttctaacctcacaagctaatggtctttgtcattcctgcacatcagccaagctaatcatgggaagaatttagtttacagtttaactttaaagcaaggatgacaataatcccttcccaacactcacccccaaggagataaggagggtgtacacactagcagctacatcatattaaagatttataggaacattgtgacctcagcaggacaaagaagttgcacagtgcccctcctcggacactcactgccacccagatgtccgctatcatcggtcacctcttgatcttaaacctcactctcttcccccttccctaatgtaaaaggagcccaaaattctattacttaagattgttctcaagacactaggtctgctatctcctcagtctgctggctctctgaaataatgtcatttttccttcccccaatatctcgtctcttgatttattggctgttgtgcagagattggtatgagctttggattcaactgcaggaggacggtgaagccagaagagatagagagagagagagaaagagaaatgagcagctgctgaatcatgagggcttccctaatggcagggaaagaagaaagttttgacagacagtggggcaagacacttgcacaaaacaggaagccagaggaatccttaaaacccacacatcatacaaaaataaagaaagaaaataaaacatgataaaagaaatgaaacccatacatcagatcacttactcctctgccttatacccttcaagagtttcctatgactttgggaataaaatccaaatcctcaccttggacaacagggccctgcaccatgtgttttccctccaccccctccacccccagctgtcacgtctctgacctggtttcccatcacttccctcatgctcattcccaccccacccccccagccacactggcctcctttcggtttctccatcacaccaagcttcgtatcgcctcagggcctttgcaaaaaatgtcccatctgccccgagtgttcctctcccagctcttccatggagagcacctacaggcctcggctcaaatgtcaccccttcaaggacatttccctgctgcccccagcacagattaccctattctatcatccaattctatttccttccgaaagcgtgccccacattacctcctatattactgtagagactgtactagtgtctcacccctccccacaactacaatgtcaatttcatgaaggcaagaaccatgtctgcctttaaaaaaaaaaaaaatcagggtctcactctgtcccacaggctagagtgcagtggcacaatctaggctcactgcagctttgatctcctgggctcaagtgatcctctgacctcagcttcctgagtagctggaactaaaggcatgcactaccacatctggctaatttttgtatttttttgtagagatcaggtgtcaccatgttacccaggctggtcttgaactcctgagctcaagcaatccacctgccttggtctcccaccaagtgctgggatcataggcatgagccaacacacccagccacaatgcctgtcttgtgatgctctatccccaaccatccatggagagatgaaaatgcatgatctggttgttaccttgcactcagctgcctaatccaagagacatgcaggtgactttgagaaggctggggctgtcctgggcccacagaattcagacagaagacactggggaaaggagaggaggtgggacagggaccagacacagagcactggaaaggagaggatgtgcaggagcaagagctgagccggattttccagacggcggcagactctggggggctgcctggacttggggcattttttctgggctggccctggacttagagaatatttttgtgatttagcggccccaatttttgtgaaatgtcctctgctgactgagagattaacctgctttgactgggccatgctaaaaaatgaacaggaatttgatatagtccagtgtggaggtggagagggagggaggtgaagaaagaacagaaggaaggggtaagacacactgaggagcagatggaagttacctgaggggatcctccaaagaagaaagggtgggctatgcaaacagtggatgtaaaaagacgcctggaagaagttaggacttggatttctaggagagattaattcgacttgtaggagcagggatttggggagaggcagagggctctgctgcctctgaaagagctcaccgagtgcgctccctctctctgactaaggacccctgtggataagaaagctctctgccctagagaagaagagcagtcaaggtgcttacaggctctttcccgaagactgaagacctttcccagggtggactgtggtgcccttccctgtgcaggcaccctgaccactgtgtgttcagagaagagggatgtggcacacacacctgagaagcactgggactcctgcgagaccaagtgggaggttgccactcctggggaccatctgatgggaagcagcggtgaagaaaagggaatggcgtctggatgtggatggaggcaggtgcttctactgctgcccggccagagaggagcatccccagagggtccgtccctagccaggctggaagcttgtctctgcgcatctggtcccctctcgaagcagttctcaaaagccgttgagacacactgctgggatgtggcaacacaccaagaggcaagaaatgtaagtccatggttcctggtaatactgaaaaaactaggctttggaagtttaagtaaacaaagaaatgagaggatataaggtaagctgttacaacgtcactgtcagttatgagtattctgttatgctttcttttgagccagtctcgctcttttgcccaggctagagtacagtggcatgatctcggctcactgcaacctttgcctcccgggttcaagcgattctcctgcctcagcctcctgagtcactgggattacacatgcccgccaccacacccagctaaatttttttgtattttagtacagacagggtttcaccatgttgcccagggtggtctcaaactcctgagctcaggcaatccgcccacctcagcctcgcaaagtgctaggattacaggtgtgggccatcatgcctggcccccattacactttctagagagaggaagaagtactaacctcacagtgcagactggagactgcacagcacatgcgcagatggtcttgacagaggatgcctccctctgtgctggggaactcatccttgcccattcagtttccgtggctcaagcaggctgatgtcagcccttggcgatgctgttggcgtgtgtgacccacaaatcattcagaggcagcagagccagcctggagatccgggctgtgacttcaggacaggagaccctctctctgcacaggttattatcctaaactgccaaaggtcactgcgtgaagcaattttactaagagccaccaaacccctctcttccctccaaccaagttcattcacccttctcagaagagcccaagagacctctgtgagagtaagacaggagttggcgatggtgcaatttgcagaacgccatgtttgttagcgccttgtcttcatgtggccggagggcactcctgaagcttcaaactcctgtaaaaacgcttcctgtccagggagggtggtatgggaagtctgaggtggctgggagaggaactggcgaagtaaggagttggagcaggagtcagagagacatgggatggggaaactcacaagcagactccaccccagtcagggaacctcactcaccgttccattaagggctggaaaaggaggcaccgacaggtgtctcacagaagcgaatggtagctgttcaggaggctggacccaggaaaaaggacataaaatcggggaggtgcctcaccctaatttttctcaactccagcagaaccttcttagagagcctcactcaattccacatttctcctcctctcagacaagcccggcagctccgtccacgtcctttgctgaatggagccagcgtggtcacttctgccctatcgaggaagctgaaggccctggcccatctctgacagctcagggcacaggaaagccttgcctctgcctagtctgccctctgcttccccaccagcgtcatctgtggcccacggctcttggctggacctgcactgaaggacacagctgctccgagctacacaacagggtggctgtccctccgccctccatgtgtggtggctgctgcagcaggatacagccagcctcctggctgctatcccacagtgctatggttgattgcgttcttacactggaagataaacagtgcttgtgtcaaagaaaatagaaacaaggccgagcatggtggctcatgcctgtaatcccagcactttgggaggcggaggtgggcagatcacttgaggtcaggagtttgagatcagcctgtccaacatggcgaaaccccatctctactaaaaatataaaaattagctgggtgtgttggcatgcgcctgtaaccccagctactcgggaggcagaagcagaagaattgcttgaaaccgggaggcagaggttgtagtgagccaagatcgcaccactgcactccagcctgggagtgctcatatgagcactcactctacagagaccctgtctcacaaaaataaataaataaataaataaataaaataaatagataaaaaaaagaggtagaagctggaaaagtggttatcttaggagtggaaggtttgctgactgagagggaataaaagggcctctagggtgctgaaaatggcctgcatctcaacctgggtggtcatacacaaatgtacagatatgttaacatgcatccagctgtatccctaagttgagctcacctttttgtatgtatgttacctgttaataacacaattgataaaagccccctctaaaatcccacatcttcctatggctaccatagatattttaggcttataattggttttgctccccatatttgctattcaagatctgtataattttggaactctcccctttttccttgccaacagggtcccaattttgttaggttcgggaagtgcccaattaatactcatttgcccaaactctcttgcggctaggaattgccatgagatacaatgtcagccagttggaaataagtacacatctgctgggtagggcttccagaaaagctatcattttcctttttccttctttagagacaaggtctcgctgtgtggcccaggctggagtacagtggtgccatcacagctcactgcagcctcccattcccaggctcaagcgatcctcccacctcagcctcccaagtagctggaactataagagtgcaccaccacacccaactagattttttttttattttttgtagagatagggggtctcactctgttgcccaggcaggtctcgaacccttggcctcaagcgatcctcttgcctcggcctctcaaagtgctggaattacaggcgtgagccactgcatctagaaaagttgtcattttcctgcttgaaaaagggatagatccatctctcatacgtcttttgctctctgtcctccctgccccctgtttttctgctcagaatgtagatgcttcttaggaccatgaagcgaaagccaagatctggggatagtgaaacagatagccagaggaccccaggctgtggatggatgagtgatcctgagcagcagccgtggacatgggttccctaattccttcatgtcccatgagaaaaataaacctctatgtgtttaagtctctgttatttgggcatatttgacagtcctcaaatgagatataagggttttatcttcataaatggcaaagacttctagagacagaagggaaggcttctgggtgctaattcactgtggcttcatatcatcaagtagcaagggctcaaggaaaaaaaaaagtgggggaaggaatccccaagacattcccaaaattaagactacattctcccctcccaccttctcctgagagcagtcttccctgcttcctatggaatctgaattcttctggcattggaaaaggctcagggaagatggctcaacgtgaagaggatctcagttcacgtaaactttaccaagagcgggtcttagagtgttatgtccactgcatcactgtttctcaatctatttttaaccacttcccacttctgataaacagaaactttactttctggtttgcattaagaaaaccagggcttttctctctctcttggaaaatttccaagcattttgaaacgtgctgccaactccccgggtgtgacacccgggagtttctgatatcctccctgcacttcctgaaaatctgccgtctaatttaagtttcctaagattctgcaaagcagacagaaaccctggtgactccagcgataccacaactcttaggggaagatgagtcatgtatgtggcagaagcaggtaatggaggaaaacagagacaaggttgggctggggaaaggaacacagagcaactagttttgccccccatctggtgtgtcttttgcaggatcagccagcacctgactgcaagtttccgcctccagacactctgctgcctctcctccctggctcagggtcagcactgaaaatcagcccaaggaaacgaccagctgccttctggcccttatcaagggtggtgtgaacccgcgctagctacccaggggtctggcccggaagcggcagggggagggctttttagtcctgtgtctagtccagtggtcacctctgcacggacagcagatggagaagggggctcggggaaggaggaaaaggtcaggcaacctctccaggattcctggaataaacattcctcctcccaagctcttcattctgtttcacaatcaaatccagagtcttataagcattcatggaaaccatgaaagcaaacaacttggtaaacggtagacagaaacagtaaatagaatcttccctctacttcctgtgtatccagaatgtttagagacagggagtggggactgacgacagattgcagcatctgggatctggggctatggcaggaacgaggacatgtggaaggctgggagttgcctgggtcttgggagtctggggttgaaggttactccttcatggtttcagggaaagagtgaagaccactggcaagaagcctggtaaccacacagacacaccctgcaggaagcagttgacaccatctcacaccctgacctgtcccccatgtcctcctctgtgggatgcacaggacttccaggggccaccaaagaagttgggtctaaccggggccctcacagtacagtggcgagtgtagtgcggtggtaaagaccatggactccagccgggcgcgggggctcacgcctgtaatccccacactctggaaggccaaggtgtgcagatcgcttgagtccaaaagttcaagaccagcctgggcacatggtgaaaccccgtctctacaaaaaatacaagcattagccgggcatggtggcgcactgtaatcttgtaatcccagctactcgggaggctgaagtgggaggatttctgaagtcgcaggtttcagtgagccaagatagtgccactgtactccagcctgggtgacagagtgagaccctgtctaaaaaaaaaaaaaaaaaattagccaggcatgctggcgtgcacctgtaattccagctactccagaggctgaggcaggagaatcacttgagcgtgggaggcagagatttcagtaagccatgattgtgcccctgcactccagcctgggcaacagagcgagaccctgtctaaaaaaataaaaaataaaaaaagcccatggactttttagttcagagttcagttcctccgtccaccagatgcatgactccaggcaaatcacttctttctctacatacttcagcttcctcgtccgttaaaggggatgagtgtgtaacttcctaggatgttttaagatttacatgagttcatctttgcaaagctttttgcatggcacttgatacacagtgtcatacaatacaataaatgttggctgccatgtctgctatgtcctctgtctgttgtaatgaattgccaaaaacttggtggcttaacataacagaaatttattctctcacagtactgaagactagaagtccaaaaccagtgtcacggggctgaaatcaaggtgcagggtctcctaattttccctcctttttcctctgtcctgaccaagaaacagagtgccttgaccaacctgcgacccagccagctgcgtgttttctctgcagacttgaacccaagccagggcttgaacattcccaggcactgataaaggtgtttagacactgaaagaaaccagccctggccctgggccaaattccttaaaccctcatgcaaacccctcccttgccccctcccttttctctcattgttcgtcttgaggatgctgcagcccactctgcaaattcccctccgaaatgctttgcactaatcaccctggcatttggtgcttcttgctttgggaacccatctggccccctcttgggatggtttggggaactcctcgacagaaactcccttgccacagcttttcggggtgactccagccagatccggctgggatggaacacaggtgttcagcaggattccatttctccggaggctcttgagaaaatccattctttgcctcttccagcttctggtgggcgctagcttgcagctacatcactccggtcctccaggatcacagcatcttctccccttctgtctgatttctccctctacctctttctttttgtgattacatttaggaccatctcagatagtccaagattatctccccatctaaagattctttttttttttttgagacggagtctcactctgttgccaggctagagtgcagtggcacgatctctgctcactgcagcctccacttcccgtattcaagtgattctcctgcctcagcctctggagtagctgggattacaggattacagatgcacaccaccatgcctggctaagtttttggatttttaatagagatgagacggggttttgccatattggccaggctggtctcgaactcctggcctcaagtgatctgcctgcctcggcctcccaaagtgctgggaacacaggtgtgagccaatgcgcccagttctgcctcctcctttttgtgattatgtttagggccatctcagatagtccaagatgacctccccatctcaagcttcttaatcccaatgcaaagtcccttttggccgtggttccagggattaggatatgggtctcttttggggggaccatcatttggccaccacagctggtgtgattggccaggagtgaagtctaataaacaggactcaggtggacggagagtggaggaaggagaggtctctgcagagagaggttggggtatggctaccggcagtgggtgggaacaaccacagaggcccaccaccaaggccacagagacagagtctgcagagttctcccaagaagctagccttgagacgctccttttaattttcttcttcagcaatgtaccagcccggggatgggttctgcagggactgtggaagtgaaggaccccacgactggagtgacaggggaggctgcataatagacaactaaaagagaagatgcacggaggggggtgggcataaactgttaccttcacagtgggtgagctcctctggtgaggcctctgcagggctcaaaaaaggtgatacgcaaatgaactcaggggaactgcactggcacaggggccattacgtctcaaagtccatcagcacgtgctggtctagattctccttccctcttcatccctaggagagttccatttctctctggcatcctgtacttccttattaattgtcatttatttaaaattgcacactgggtgcaatggcccacacctgtaatcccagcacttagggaggccaaagcaggagaatcgcttgaggccaggtgtttgagaccagcctgagaaacacagcaagaccctgtctctacaaaaaatagcaaattagccaagtgtggtggccaagcccgtagtctcagctacttgggaggccgaggtgggaggaccgctggagcccaggaggtcgaggctggagtgagctatgatcacaccactgcactccagcctgaagtgacagagcgagacccccacctctaaaaataataataatcagcccagacgtggtggttcacacctgtaatcccagcactttgggaagccaaggtgagagtatggcttgaggccaggagtttgagaccagcctgggcaacataacaagaccccatctctaccaaaaataaaaataataaaaacatttagaaataataataataaaacaaagttacatatctcaaatcctaagtgatcctctctgccccgggtgcacattctcccttatccatgccatcctcaatcccctcaacccctggcgactgcaacaccctcctagcggatccctctgcttccagttctgtccttctagggagcattcttcacacagtagcaggcttgatcttctagaatcatatatcacatcacatcattcccctcttatggccctaagtgacttcccactgctcaaaaatggagtcttaaggccgggtgcagtggctcacacctgtaatcccagcatttgggaggctggcaattgtttcattcattcattcatttaacaaatatatatccaccccccaggatgtgccaggatctgtgccaagcattagaaatatcatggttgaaaaatacagatgggtccaggcgcagaggctgacgcctgtaatcccagcattttgggaggccgaggcaggcggttcacctgaggtcaggagttcaagaccagcctggccaacatggtgaaaccccgtctctactaaaaatacaaaaattagcagggcatggtgacagacacctgtaatcccagctactcaagaggctgagacgggaaaatcaattaaacccaggaggcagaggttgcaatgagccaagatcacgccactatgctccagcctggatgacagagcaagactccgtctcaaaaaaaaaaaaaaaggtatatagcctggatcatcagtgctgaccatgaggaaaaaggtcctgtggcttttgctgcaagtcccttaaaccacaagacagctctcaagtgattacacgtccaggatgtcttaacaggtcccagaaaaagataaatgaggcatctgaggacaagcgtcctctgagtttttgaaatggacttatctccattctgaagtcactctcatccatctatcctccactgtcatccaggaaatagttactaagggcctaacatgttccaggctgcacgccaggtcctgaggatgcaatggtgagcaaagcagctgtgttccctgctttgtggacagtctcataaggggaggtagacttcacatccatcttaatgcaaatcctcatgctaatgaacacattataataaattgagacgtgggacataggaaggaatagtaaaagatgctatgagagcaaccaacaatgagaaaataaactctaaaaaaattaaatttacagctgcctccaaaatatttagaatcatgcaaaacctctatgctgacaactagaaagcattgctgagaggaattaaagacctaaataaatggagagagatgtccagtgtcaatgatcccaaattgatctatggattcagtgtgagcccattcaaaattccagcaggcttttctgtagaaattgattttaatatttatatgaacatgcaaatgacccagaatagccacagcaaatttagaaaagaagaaggaagttggaggacttactctatttcaagacttattatgaaaccacagtaatcaagactgtgtgcaggccgggcacagtggttcgtgcctgtaatcccagcacttcgggaggccggggcacgtggatcacttgaggtcaggagttgaagacttgcctggccaacatggcgaaaccctgtctctaatacaaatacaaaaattagccgggggtggtggcaagcatctgtaatcccagctactcaggaggctgagacagaagaattgctggaacccaggaggaggagggttcagtgagctgagatcacgccacaacactgtagcctgggagacagagcaagactccatctaaaaataaaaattttaaaaaataataaaaataaataaattttaaaaataccgtgtgcaaatgatgaaaggcaagacacagagtctctcagaagaatagagcgtccagaaatagtaccacacacacatacaaccaatgggtttttagtacaggtgccgcggcaattcaacagggaaaggaaaatctggaataattggataaggaggtaaaagcttcttaggacataaaagcacaaaccatagaagaaaaaccagataaattagaccttgtcaaaatgtaacacttttttgcttttcaagagacaattaagaaaatgaagaccaggcacagtggctcatgcctgtaatcccagcactttgggaggccgaggtgggcagactgcttgagctcaggaggtcgatgccagcttggacaaaatggcaaaacctcatcagtacaaaaaatagaaaaattagtcaggcatggtggcaggtgcctgcagtcccagctacttggagggctgaggcggaaaggtcacctgagcctgggaggtcaaggctgcaatgagctgtgatggagccactgcactccagcctgggcaacaaagtgaaactctgtctcaaaaaaaaaaaaaattaaaagaagagaaaagtcacagaatggcagaaaatattggtaatatatacatctgacaaatgactagtaccaagaatataataaagaactctcagaactcaactatatgaaaataatccaatttttcttttttttttttttttttttgagacagagtttcactctgttgcccaggctggagtgcagtagtatgatcttggctcactgcaacctctgcctcctgggttcaagcgatcctcctgcctcagcctccctagtagctgggattacaggcgcccgccaccacgcccagctaaattttgtatttttagtagagatgaggtttcactatgttggccaggctggtctgaaactcctgacctcaagcaatccacccacttcagcctccaaaaatgctaggattacaggtgtgagccaccatgcccagcctaaaattttttaaatgagcaaaatatttaaacagacattccacgaaagaagatatacaaatggctcataagtacttgaaaaaatgcttaacaccaataatcatcaagaaagtataaattaagaccacaacaaaggccgggtacggtggtccacgcctgtaatcccagcactttgggcagctgaggcgggcagatcacctgaggtcaggagttcaagaccagtctggccaacatggcaaaaccccatctgtattaaaaatacaaaaattagccaggtgtggtggcacgtgcctgtaatcccagctactcagggggctgaggcacgagaatggcttgaacccaggaggtgaagtttgcagtgagtggagatggcgccactgcactccagcctgggcgacagatcgagactctgtctcacacacacacacaaaaataccatggcatacttattagaatgcccacaattaaaaactaacaattgtcaagtgttggtgaggatgtggagcaactgaaatgctcgtaggctgctggtgggaatgcaacatggcacagctactttggaaaactggtagtttcttaaaaagttaataaaacgttttaccataccacctggccaatacactgccaggtatttgcccaacagcactgaaaacatttccacacaagaatgttcttaacagctgtattcatactagacaaaaactttttaaaaaaaacccaaaccaaccaaatatccatcaacagatgaatggataaataaaataggaaatatccttaaaacagaatactattcagcaatagaaaagatgcttaacctgtaagaggggaatcgaaatctaggaggtcagggccttttttttttttttttttttttttgagacagagtcttgctctgtcgcccaggctggaatgcagtggcgcaatcttggctcactgcaacctccgcctcctgggttcaagtgattctcctgcttcagcctcctgactagctgggattacaggcgtgcgccactatcccggctaatttttgtatatttagtagagacgggatttcgccatgttggccaggctggtctcgaactccttacctcaggtaatccacctgcctcggcctcccaaagtgctgggattacaggtgtgaaccactgtgcccagccagacagggatttcttaaggaagtaaatggttatctgaaagaaagctacaaattaactgtgaaagttggaatgggtaacaagaaataaagacataccaggcaggggctggttcaagctccccatggcagatggaaaacatgacacattcacagaagtggaaaatggccctgcccagacagcaaagagagagaagagtgatgtgagtggaagctggcaagggccatgctaggcaggcctttttaaggatgttgatatttctcctaaaagcagtgagaagtctctgaaaggacaagaaggtcgtataattggattgacatttttaaaatgattccactaatacagtatggagaactgactgccagggaagcagatggatgagaggaagtgagtcagggccctgctgaaatcctggtagggatgatggcactgagatgggatgatggagatggagacggatggatggattcatatttggaatccataagtatttggggagtacatcagactgcattctagggataaggaagaagataatattgagattcactttaagactgactctagtcaggctcagtggctcacgcctataatcccagcactttgggaggccaaggcgggcgaatcacttgaggtcaggagttcgagaccagcctgaccaacatggtgaaaccccgtttctactaaaaatacaaaaattagccgagtgtggtggcacatgcctgtaatcccagctactcgggaggctgaggcatgagaattgcttgaatctgggaggcagaggtggcagtgagccgagactatgtgccactgcactccagcctgggcgacagagtgagattcagtctcgaaattaaaaagaaaaaaaaaaaagactgactctaagataatggtgcaggagatgtgatgggaagagatcttacgccccaagacagggaagggtggaagaaggaagatctgaggccaggtctggacacatttgatttggttgatttgggacacctgtgagacacccaatggcagtgtcaactaggcagttgagcgtgtacatgtgaagctcacagaaacctagggtgaagattcaaaccaggggtgtcatgaaggtggtaactggaactacggaaacagttgcagtcgactagaaggagagcacaggcgagaacaggaaagaacctggagccaagcttgaaggaagtcaccatttcggggatgagtaggggaatggtgagctagcaaaggggtacgagaagtgaccaaaggaaagagagggaagctagcagcgtaacgtatcagaatttgtgaaaagaggatgtttccagaagggcgtggaaattgtgttgaatgctaataaaataagaaaagcgtaagtccactgaatttaggaacatggaggtcactgctaacatcgggaagagaaaatcccatggaaaataggcacagaacccagattagggtggactgaggggcgagtgagaattaagaatgtggaagtgattacacagaactttagataagggtccaacttcctgtgatgacaggctgcattataaagacgatgagagaaaactgaacttggaaggaactgtgaaggatattgctcttgtgaaagtttacccccttgaactcggtctgagaggttgggtttccttttcctgtgacgtaggtggacatcatgaactgtgagactgaaagcctccttggtgatgctcccttcataactgcggtgaacattcataactgctgtgaacccagagagggggtttcgttggggcgtcttccacagggggactcacgacagtgacggcgaaaggcaggaggtggggggagaagaacgtgcagagacagagaggcagtcccactcctcaacacttgttttccaatgagtttcctggattctgcaattaaatccagatcctcgtgcatgtttataggaaatcataaaagcgaaatgacacaaataaatttggtggcaacaagagagaatggtctctttcttagttctcctgttgatctgagaagcgacgtgtgctgggggaaggaaataaagaactagaacgccttcagaggagagtagagtggacgagaaagaaaagctaaatatcaaaatgtctagaccctggggttacagaccacaaaaagaataaatgactgactgactgaatgactgaatgaatggcaaacaataggaagtaggtatgtcctagggaaagaatggggattctgtgagcaggaatcaggccacagatggcagaacagagacttctttctgagacttcctccctagttcaagaggaaaacacgttccaacgatccttgctgcattaggtgtgtatttcaaagggaccttcaggagctcctaacctggggctaccaaggtcagagagggggaaacagtgagactttatcagggaaaggaatggagcctgagtgccactccctgacgaaaagccacatgggcacgtgaactcgggcctcctgaattcctgacactttcccaagagggacagcacatccatgccctgagcctctggaggctgcaccaagtggctcactctctgtgaagctgcgttacaggcttgagacgaggcagcacttacgggcatctgctaagtgctttatatacacaacctcactgaatcctcgcagaagtcctaggatgtcagaattcgcatgctcacttgactacagcaaactagacttcagaaaacggatctgcccccaaggttgtaatgaagggacctggatttgagcccatatctgcatgactataactcccacaccatttccatcacaacaagatgcaggccaggaccagcctgtttcagctgagacgggcaaaagaaatgtgttgggggcagagggcaggagaccatagagaaagtaaaaaaattgaagaagaaaaggaaggagtgccgggtgcagtggctcacgcctgtaatcgcagcactttgggaggccaaggcaggcggatcacttgaggtcaggagtgcaagaccagccaacatggtgaaaccctgtctctactaaaaatacagaaattagctgggcgtggtggcaggtgcctgtcatcccagggaggctgacgcaggagaatcgcttggactcgggaggcagaggttgcagtgagctgagatggcgccactgcactccagcctagacaacagagcaagattcagcctcgaaaaaaaaaaccaaaaaaaaagaggaaaaataaaaaggaaggaggaaagctcatttctgagaatgagcagaatgacagaagaaactgcctaagaaagagaaaagaaaataatctgacttgggaagtaaaaaaagaaaaatgcctgggaattttttttttaaatcaggaattaaggacagaaaaatctgaatttggaagtcaagagtgaggattctctagggagagaataaagatgctgggcctttcctttgggtttgagaggaaatagtgcttaaagactgaccttcctttctctggtcacgtggctggtgctagtataaatgcttactaccagccaggttcctcaccattttttcctgcatggcatggacagaagcaggggctaaagctctgttcctctctcctggaagcttgcagacctcccttcagaaccaatcccaagaagccacctatccggaacaacacaaggcaaggcagctagtgtagtgcttgtgctctgggaagagaggccaggatcaggtttgaggggaaggttctgggagactggaggaaggatgtcagaaccaaatggaagactcatacccagagacaggagctagtgtgaggagcaaggaaacagccaggaaatcaaggctggagagtggacagagggacaggacctgggttggggccagcaagggtgacaccccaagtggaaactgagttaccccgtgaagaagacgagttctatttatggtcagaatgccacgctcaagggccagtgaaggcctgtgggcttttctgaatatttctctaaggtcttctagggacaagccttcctcctaaggctagtgctggttcatccttcttcccctccaccctcctctaagcctcccagcttccccttttcttttctttttttttttttttagacggagtttttgctcttaccgcccagggtggagtgcaatggcgcaatcttgactcactgcaacctctgcttcccggttcaagcgattctcctgcctcagcctaccaagtagctgggattacaggtgcccgccatatcacccggctaattttttttttttttagtggagatggggtttcaccacgttggccaggcttgtttcgaactcctgacttcaggtgatctgcccgcctcggcctcccaaagtgctgggattacagaagtgagccactgcgcccagccccagcttccccttttctagagagtcccagagtttggtgttggacaggagaggacaaggtgggggagaatctgtgctctgcaaaacagacgaacggaagtaggaagctgggctggtggctgggcacttgggtcctttggagagctggcactgggtatccgcgcctggggcgccacagcctctttatactgataagcatcttacagctctctcccggcactgatgcctttctctcctgcaggtctctgtctgagaaagggacttgagtaaagttagaaactggcaacagtaacttcctgtatctgtgaggacaggaggagaaaggctagggaaactggagggggaattcccttgggaagccacgagttggtctcctccagagacacatgatggcaaacataatcactactgcttaatatcccgccccaggcaaagtcaataattgctctgggtagttcgagcaggtggtgtgagcaagccgtggtggcatcagaaagcacagtcctgggaaggggacggtgccggggaggatgtccgcatcctgaaggagagctggctgcgcgggctgtgagtgagacctccctgaccccgcccttttttgttcccctccaggatgctgccggactggaagagctccttgatcctcatggcttacatcatcatcttcctcactggcctccctgccaacctcctggccctgcgggcctttgtggggcggatccgccagccccagcctgcacctgtgcacatcctcctgctgagcctgacgctggccgacctcctcctgctgctgctgctgcccttcaagatcatcgaggctgcgtcgaacttccgctggtacctgcccaaggtcgtctgcgccctcacgagttttggcttctacagcagcatctactgcagcacgtggctcctggcgggcatcagcatcgagcgctacctgggagtggctttccccgtgcagtacaagctctcccgccggcctctgtatggagtgattgcagctctggtggcctgggttatgtcctttggtcactgcaccatcgtgatcatcgttcaatacttgaacacgactgagcaggtcagaagtggcaatgaaattacctgctacgagaacttcaccgataaccagttggacgtggtgctgcccgtgcggctggagctgtgcctggtgctcttcttcatccccatggcagtcaccatcttctgctactggcgttttgtgtggatcatgctctcccagccccttgtgggggcccagaggcggcgccgagccgtggggctggctgtggtgacgctgctcaatttcctggtgtgcttcggaccttacaacgtgtcccacctggtggggtatcaccagagaaaaagcccctggtggcggtcaatagccgtggtgttcagttcactcaacgccagtctggaccccctgctcttctatttctcttcttcagtggtgcgcagggcatttgggagagggctgcaggtgctgcggaatcagggctcctccctgttgggacgcagaggcaaagacacagcagaggggacaaatgaggacaggggtgtgggtcaaggagaagggatgccaagttcggacttcactacagagtagcagtttccctggaccttcagaggtcgcctgggttacacaggagctgggaagcctgggagaggcggagcaggaaggctcccatccagattcagaaatccttagacccagcccaggactgcgactttgaaaaaaatgcctttcaccagcttggtatcccttcctgactgaattgtcctactcaaaggagcataagtcagagatgcacgaagaagtagttaggtatagaagcacctgccgggtgtggtggctcatgcctataatcccagaactttgggaggctgaggcaggtggatcacttgaggtcgggagattgagaacatcctggtcaacatgggaaaaccccgtctctactaaaaatacaaaaaaattagctgggcatggtggcacatgcctataatcccagctactctggaggctgaggcaggagaatccttgaacccgggagttggaggttgcagtgagctgagatcacgccactgcactccagcctagcgacagagcaagactccatttaaaaaaaaaaaaaaaaaaaaaaagaagcaccttcaggctggagaagcagcgtagctaacacaagtccagtccttgtgatgtggctggtagttggggatggccaggctgaagcagagagtcctagagaaatctcgatacaagcttcaaagcaacacctagacactgctctagcggttgatcctggagataaaccaacaagagagagatggaagagaaatactaaatgaggtcaaagaagactcagaaaggttctgagcctggagatgagcagggaggcctcagggcttagacctttaatgataggggtttccctgcattggtttgacctgttgcctttttgatgtgctctgtttgttttcatgtgttgtcttgtctcccctgctaaactgggagctgccaggggtctgggtcttatctccttcctccatggtaccccacacaggccaggatgtggtttggtacccagcaatcagagattggcactccctcatacaggggaaagcaacctggtctagcaaattgaaaataaagatgataaaactctgaagtgaatgtccacaatttttgtaacactgctgcaagcacagggagggcaaaaataggagagagaaccagattcagcagcaaaggggaaaagtgatgcatctgaaaccacagaaacatcttaagataaagaggtggtgtgggcaaaggaagtgagagcactgacggaatcgtctttcgagggatgaatagagagtccggacttagaaaggatgcagggtgattccgattcacagtcatctgtctgccacagggccttaaaacatgtcaccctcctgctcagaaacctgcagagctttcctatcatcaaaatgtttccttggccagttgcaggggctcatgactgtaatcccagcactttgggaggctgaggtgggaggatcacttgagcccaggagttggagacccacctgggcaacacagtgagaccctgtctctcaattttaaaaatttaatttaaaaagatgcgtccggctgggcacagtggctcatgcctgtaatcccagcagtttgggaggccaaggcgggaggatcgcctgaggtcagaagttctagaccagcctggctaacatggtaaaaccccatctctactaaaaagacaaaaaaaattagccgggcatggtggtgcgtgcctgtaatcccagctactgaggaggctgaggcaggagaatcacttgaacctgggaggcagaggttgcagtgagccgagattgcgccactgcactccagcctgggcaacagagcgagactctgtctccaaaaaaaaaaaaaaaagtgcttcccccaaggaactcatattgtaccattcttttccttgctttgtcctctctctccccttccagttctacctgcctagctcatttttccacaataaggactcctagaccattctctctagttaaatgacctccagcccctaacctagtagtttgcaacccaggctgtacatcagaattacatgtggaggtgtgaaaataatacagagagccacctccaacctactgacagaatctctgcaggtggggccccagcaagagagcttttcaaaaaagcaccccaggtggccagctggggtcgcgaatcgctgtcttatctcagaagccaaatctgtccaagaacttgttcttcaaaaaccttgcctgcttattcatcccccctcacctcaatcccacattcttctacctgtttttttgttggtttgtttgtttttagagttggggtctcactctgttgcccaagctggagtgcagtggcacaatcatggctcactgcaacctcgaactcctgggctcaagtcaccctcccgcctcagcctcccaagtagatgggactacaggtgtacaccaccacactcagctaattattttattttattttgtgtagagatggggtgttgcccagactggtcttgaactcctggcctcaagtgattctcctgccttggcctcccaaagtgttgggattacagatgtgagccaccacacctggccctcccccatcttctggtgcttgcctcttcttcacttacaaaaatccactcaatattcactttctccagaaaacctttccttattagtcccactgaactgaaagctcattttctattttcctccttcaaaagaagactggacaggtgccataagaaccctgaattcagtgtccattccacttactaaatggatggcctgaagcaagccacctcctccagcctctatttctaaatcatagtgattaggatactacatacctcccaagattattctgtggattaaaataagactctatgaataaaattgctgagaaatcatagaatattaagtagttctaagatataaatccatgtacacagatgtaccctcacttattagaaatataataagtaaacattaaaaatagtggaaataatgctgggcatggtggctcatgcctgtaatcccagcactttgggaggccgagatgggcagatcacttgagatcaggagttcaagatcagcctagccaacatggtgaaatcccatctctactaaaaatacaaaaaattagccaggcacggtggcaggcacctgtaatcccagctactcgggaggctgaggcatgggaatcgcttgaacctggaaggcagaggttgcagtgagctgagaacgtgccactgcactccagcctaggcaacagagagagaatgtctcaaaaaaaaaaaaaaatagaaataacatagtaggtagtcaactacggatagcatggcagtaatatgttttaaaaaatctgggattctcagctgactgtacatgcactatgagtctgtgatgtattacagctgccacaaaagct[131 bp omitted]cggtgaaaccccatctctactaaaaatacaaaaaattagctgggcatggtggcgtatgcctgtaatcccagctgtttgggaggctgaggcaggagaattgcttgaacccgggaggcggaggttgcagtgagccgagatcacgccattgcactccagcctgggcgacaagagcaaaactctgtctcaaaaataaaaagaaaagaaataatgtctagacaagttgatgatactgaggcagagcaggtgtgctaagtggggcttggcccatgagggttcttggttttgcccaggaaagaattcaagggctagccggtggtgaaagaaaacagctttgttgaagcagccctgttacagctccagccctgttgcagctccgtgactgctcctgcagagcagggctaccccacaggcagagagtagcagctcagggcagttttgcagtcatatttttgcctacttttaattgcacacaaattaaggggcagttaacacagaaatttctaaggaaagggtagtaacttttgggttgtcaggtcattgccatggaaaggggtggtaatgcccaggtgttgccatggccacagtaaacatggcactctggcgggcatgctttatgaaaagctgcttcaccctttccttgttttagctagtcctcaatttggtccaatgtccaaacaccacccctggggtcaagtccctcctcctacctccataacccccattccacttaggtctaatcagcagcaggttcagaactgagcaacacattctcttgtattttttttttttttttttttgagatggagtttcactctgtcacccaggctggagtgcagtcgcacaatctcagctcactgcaacctccacttcccaggttcaagcaattctcctgcctcagcctcccgagtagctgggattacaggtgcatgccaccacgcctggctaatttttgtatttttagtagagacggggtttcgctatgttgtccaggctggtcttgaactcctgacttcaagtgatccacccgcctcggcctcctaaagtgctgggattacaggcgtgagtcactacat[140 bp omitted]gtgaaaccccgtctctactaaaaatacaaaaaattagccgggcgtggtggcaggcgcctgtaatcccagctactcgggaggctgaggcaggagaattgcttgaacccgggaggcggaggttgcagtgagccgagatcgtgccactgcactccagcctgggcggcaacaagagcaaaactctgtttcaaaaaaaaaaaaaaggacactagctcaatgaatcaagcccagaaaaattaaccaaaatgttttggagatttaagactgtataacaatagtaatagccgtaataatagagcaaattaaataccaggcactgtgccaagaaggggcctgagagggttaaggtcacttttcaaggccaataggtggcagggagtttgaatccaggtctttctgagcctaaagtgcatgctgttttcactgacacatgagaaggaagtaagagaacactggctgggacaagataagatctttttttttttttttttttgaggcagagtctcgctctgttgcccaggctggagtacagtggtgcaatcttggctcactgcaacctccacttcccaggttcaagcaattctcatgcctcagcctcctgagtagctgggattacaggcgtccaccaccatccctggctagaagatacactctatgagccacacaggacagaacaaagaccacaggtggaagaggcacagagatacctttcaaatagttatggccatttcaatggaactgactatctcagcaaagaagtcactccccaatttccaggaatattcaagaaggtagcaaacatctatcctaggacactgaggaaactcacacaaatgagggctgaaccagtttaatgaccacttccaactctacgattcccaggttcttttttcttttccttttttttttttttttttttttgagatggagtcttgctctatcactcaggctggagtgcaatggcgggagtgcaatggcacgatctcggctcactgcaacctctacctccgaggttcaagcgattctcctgcctcggcctcctgagcagctgggactacaggtgtgcaccaccaagcccagctaatttttatattttcagtagagatgtggctcatgcctgtaatcccagcactttgggaggccgaggtgggcagattgtctgaggtcaggagtttgagacaagcctggccaacatggtgattctcaggttctttaggggcacgacttctcttactaaccaggaaagtacaaaatgaagtcattttgctgggcacggtggctcacacctgtaatcccagcactttgggagtccaaggcaggcagatcataaggtcaggagttcgagaccagcctgaccaacacagtgaaaccccatctctactaaaaatacaaaaattagccagttgtggtggcacgcgcctgtaatcccagctactcgggaggctgaggcaggagaatcgcttgaacccgggagtcggaggttgcagtgagccgagattgcaccactgcactccagcctgagtgacagagcgagactccgtataaaaaaaaaaaagagtcattttgttgtcatggggttataagaagatcgatcactggacctggtctaagactttcaaagtgaagctgtagctgctcacttacaagcatttgaccttcatcaagttacctgacatagcagcccatttcttcactgggaaatcagtcgatcacctgttcaacaaatatgtattcattaccaactccaggccagatacttttctagggtctagggatacagagcgtacaaaagacaagtatcttccctgttgggacttccattctggtaggggaacatagtttaaaaacaggtaaacaaatagatgagcaaggtgatttcagagtgtggcaaatggaaagtagttacaaaggaactgaaacaaggtcatgggagaaactataaggggaggttgaggaggtttagaagatcattctactctcttgcttcaaaccttcacctggcttccagaagctcttagaagctcattcaaactccttttagtgacctaaaatactttgcacggtcggtcttttcaggcagctgctagcccgatgaaaaccctgcgtgtttgcatagaagtctatggtttcttaactctcatgcacatggtctccttgatcctaacaaacattccccttcaggtcccttcaggtaggcacagctgccagaatgatattcttaaaatggaaatcagatcattccaatatcttgcttcaaatcctcgaatgacttctagaggctcttagaatacaaattcctttctgtgacctggaagcccctgctcagctcctcaacctcatcttctttcactctgtccccattgatagtattccagcccagaggttctcaatatgtggcctctgagccagcagctgctgcatcacctgggaacaagccacttgacacatcggcctgtttcttcatttggaagttgaatctcctaagttagtgatgttcagctgagccctgaacaatgaaagggagttgacatacaaaggcccgcaggaacattctggaaacagaaattgctgatgcaaaggctctgaggagagagaaaaccttagcatctctcaaggccagagagaaggccagtgaagggctcaaacaggggttttaaatgtaagcaaatattggaactacctgaagcgtttgctgaaccatagatgactgtcctcacttccccaggacttcagaatcagtagggatattggtcagggttctccagaaaacagaaccgagaggacagacagattacatagacagataagtagataggtagacagataatagattagagagatagagaaagagagagagagacagagacagagagataaagatacacaggtaggtagtaggtagacagataatagattagatagatagatagatagacagatagagatagatagatatacacaggtagctagtaggtagacagataatagattagatagatagatatgcacaggtaggtagtaggtagacagataacagagtagatagatgatagatagacagatagatagatgatagatagatagatagatatacacaggtaggtagtaggtagacagataatagattagatagatagatagatagatagatagatagatagatagatagatagatgatagatagatgggggaagggtaggaagccctgatctattgcatttgcaaatttctgtggcacatacactcccaccaggaatcattgctaccaatatgaagatcttgaacatgggtttggcaagagatgctaataatgggctcttattataatgtaatgagctcagacatatccctgcatgcaactcacagtacatctgctcaaatggcagccagatcacatcttccttgagaaaactttctctttccccaccaacgcttcatgcaagcctcttgcacagtgcttcctatacagtaaacactagttaaatgtggctggctgggcctgctccaaagcatccgggtggctgtatgattgcacagctcctctgaaccccctgccccaaagcaggatgacagatgggtaaacagaaatattagtgcctggttaatgaataacacagacggcagcctagtgccgctaccaggaaacaggggtggagggatctgacctggcccaacctgggggcctgagcagcacgaaaagggaacctggcattatttcacttcccctttctggaaaagatgctcctgggccccttcctcagaacttctcatcagtccgcacaaccagagctcaggtgcagtgtggcttggtgatgaatactatggttggaaaaggagggatgggggcagtgggcatggagagggtctggaggaaacacacagccatgattccagcctcactcccttaaacgtcctgcctctcagcgcggggtctgtgctagttcttcttttcgccttgccctgcctcctgtggataagtgcttttgccccacttttttttttccttttcattatttatctctaatcacaggaaatgaggacatttctcatctacaaattgcacatcccatcaggaaattgggccaaagatctctaagccttcagaagcggtcatccagtaacccacttggcaaagtttcaaaggtctgggaaagtagatgcgaggtcaagcagtgcgggaggggagccaactctgcaaacgctggccacggccagctggccaccagcagcttacccgaggaggggttgtccaagctacatactaaccccggttccctctccccaaacattgtcctctgccatctgtcagtccgagctacgaccagcctcgagaaaacagagttaggaaagtaaacacactgctcccaaatctagctattttaaataaaaagctcacccatgtgggctgcagttgagaatttctaaagtgccatggcaaacattacaccatttgagtttccacggcgtagccttcattcatccgccaacatttatggaggcctaccatgtgtcaggccctgttttaggtgctaaggatacagcagtgaacaaaaagggtaagattcctgccctcaagcagctcccattgctgggcagacagggagagcaagacccataagcaggatcctttgcactggtgctacgtgctgtgaagacgatagaaccgagctgggatagaacatgactcccaggaagggagtaggtggttacttttgaacacacagcttgagcttgagaaggccatgcaaaggtgatatttgagctgggactagaatggcaaggaggaatcttgtatgccaagaactgggggaataatgtcccaagcaaggggctccaggcctgtgcgaggcctgaacaggctgaatttgtgccgggaaaagaaacgccagggtggctgcagcttagtgacagctgaaaagccagcaagt[144 bp omitted]aaaaccccgtctctactaaaaatacaaaaaaattagccaggcgtggtggcacacacctataatcccagctactcaggggcaggagaatcacttgaacccgggaggcagaggttgcagtaagatgagatcgcaccactgtactccagtcttgcaacagagagagactccaaatcaaaaaaaaaaaaaaaagaagaagcgcaacagatatcctctccctacttaacaacaagaaaagctgaggctcagcgatgcaaagtggcaaagtggcaaagtgacacacgcaagtcctcagtgagatggtgttctggcccctcctccacgattcccgactccctctcaaaaccacaggcacactctctctcaatctttacttcactgaggaagagaaaagagggcaggaatcgtgactcatgcggtgtgcagttgtttggtatagaaagttggggagagtgatggagactgacctccatcgaggttctgagaaaggaaaggcatcgggggtggggtaagatgcctggtgctgagagcagagtagagaccagcaagaaacctggcttctaggaggagtcgtggctggggagaagaaggggcctgggctccaagaaagtgatgggaggccaaggagtcaccaagagccgtcccatgttgtcccgggtccactggcctgcaacagaaatgaaggtgtgaggacagaagcatagagctcgggggatgcgagcaggcctccagcctgcgtccacttctcaaccctggctgcgctccaaagccactggaggagtttccaaaactgccggtgtgtttgggcattgtattttctaaagctctccagttgcttgtgaagtagagtgagggttgagaagcagtgaatttagtcctggtcctctaggggacaagctgagggctctccaggaaggggcagcagggtgtactgagtttgaatcctgtcctagcgctgtgcaactcaaccttgctgcgctttcgttttctcacgagaattttttttttttctttgagacggagtctcgctctgtcgcccaggctggagtagagtggcatcatctcagctcactgcaacctccgtctccccggttcaagcaattcttgtgcctcgccctcctaagtagctgggattacaggcatgcgccaccactcccagctaatttttgtatttttagtagagacgggctttcac[140 bp omitted]ggctcacacctgtaatcctaacaccttgggaggccaaggtagaaggatcacttgagaccaggtgtttgagaccagcctgggcaacagagtaagaccccatctctaaataaataaataaataaataaataaataaataaataaataaataaataaatatagttgattttaaaaaagaaaaagaaaaaaatgaaattattaaataaaataaattagccaggcatggtggcacacacctgtagtcccagctacttgggaggctgaggagggaggactgttggaacccaggaggtggaggctgcagtgagccactgtactccagcctgaatgacagagtgagaccctgacccaaaaaatatataagtaagaaataaaagaagaaaaaaatagggctaacagcacctacatcatcatgttattatgaggatgaaacgaatttcatattgtacctccaaagcacttagaaaagtgtctcgcactggagatgccaaatacatgtttaaccatggaaatgttttaaaactgtaattccattcttctgctcgaaggcctccagatacttctcatgatcctcagagtaaaatcccatgccttccccaaagccagcaaggcccctgatgcatctagcacttggctctcacccaacccagctcatccctactcccttcctccaagccctcctccagctcccttcactcttccttttttgttaccgacagctcactaagctccttctccttgtggttcccttttcgtggagccctcgttccccaggtactcatccagctgaatttcccctctttgaggctgcctgtgactcaaattttatttcctcaaaggacttccccctccaccactcctaagtggcttcccttttgacacattcacataatacctagttgctgacttcgctgggtgtatcattagctgatagcatctatttttgtctacttgttatttttatccgttagacttgcacatcccttaatgcatcaaatggttgactgtgaaaaacaacttccttcccctctctctccaccacagtcacttaccgcttcctggaggcagctgctgctacctcttgtcagcaaaatatttatccctccatgcctttaaggggcttgcttattttactgtatttcttcatttctcaatataaggtttcatctgttaaattattctgtggcagatgaagattatgctcttattcttttcccaatatgtacaacacccttcccgccctgtcttcccgatctgctcccattgtcactatgttagaaaatattcagtgtttgcataatcgtgactacatcgatgttaatgacattggagctctgtagtaaataacagctcctttttttttttttcttgagacagaatctcactctgtcacccaggctggagtgcagtggcacgatctcagctcactgcaacttccacctcccaggttcaagcaattctccctgcctaagcctcccgagtagctgggattacaggtgcccgccacctagcctgaataatttttatttttagtagagactgagtttcactgtgttagccaggatggtctcgatcttctgacctggtgatccgcctgcctcggcctcccaaagtgctgggattacaggtgtgagccaccgcgcccagccagttccttttttatcctgcacaactttcctcccaaaacccctggaattaataatcaccttattttttcatgtgtttagtctacatgtttaccacgaattcaaccccaaactctttgtcaatgttcttgtctcctctcaagaacttcaggggttttaggaggatacagatttcatctccctgaagaaatgtgtcttggaactttctgacctgttccagtctgcctgggtggtggtttatgccaggtgtatagctcatgcttgaagctcttttttttttcttttagatggagtctcgctctgttgcccaggctggagtgcagtggtttgatcttggctcactgcaacctctgcctcctgggttcaagcaattctgttgcctcagcttcccgagtagctgggattacaggtgcgtgccttcatgcccagctaatttttcttgtatttttagtagagacggggtttcaccatgttggtcttgaactcctggccccatgtgatccacccacctcggcctcccaaagtgctgggattacaggcattgagccaccgtgcccagccagctcacacctgaagctcttaagtggaaagcctctttgcttctctgctcttgtcttcctcttccttggtttacatccttaagcagcttctttatttactgctgggaataacgctccaaatcctaaggaaactgaacactcaaacaaaggattcttagccaagcaattttacttgcgcagaggggtgcttctccttggccagttgccatgagagcacacctgaacaaaggggcacgagagcctttattcctaatgcaagtcctgcccctgtaccctttccccattggccggagtcgggccatacaatctaaactagtcccagttggctaaacatttgaactttctttagataaggtgggcacgtaagggagagaggggaaaggggaaggggtgtctgcagtgagctagagagctagtcttctttccaaataaggaaaagaacgtgagctggtactaataacgcctggtactgtggcgtgtctgggcatggaacaaaggcagaaaggaaaaagaaggagcaaaaggaaaagggggtggggggatactatgaattaaagaataaaggattgatcggctatttgaagagaaacctcatcatagcccacatttacttattttattatttattaacttttttggagacagagtctcgctctgttgcccaggctggagtgtggtggtacaatcatggctcactgcggcctccatctcctgggcccagacaatcctcctgcccaatcccctaaaagcattgggatcacaggtgtcaccacacctggctattttgtttgttcgtttatagaaaggggagggtctcactatcctgcccagggctggtctcaaactcctgggctcaagtcatccttctgcctcggcctcccaaattgctgggattacaggcatgagccaccatgcccaaccctgacgcagcttctttagaaagtaaatgctttgaaatcccgcatgtcagaaaatgtctttatcccactctcatgtgtagttgatattgggctatgtatggaatattctgggttggcaatcattcttcttcagaacttgaaaggcattgccgcattgccttctagcgtccagtctggctgaaaattcccaagacatcctgactcctatcctttgtccatggcctgtctttttctctctggaagcctgcaggatccttacctttctcacaaggtatctaaaattccatccattgggcattcaatggactcttccagtctacaaaataatttccttccatttgggaagattctcttgaaacactttgtgatggtttccttgccttcattttctctcttctctccttctggaatccttgttatttgggggacactgcacctcttacacggccctctaattttcccttttttcccattttttctctccccattgttttgctttactttctgtgagattttcttatcttccagcccttctatttttcatttttgctatcacttttcatttctgagcacatttttattccttcttagcatgctgaccttgtttcatgattgcaatgtccactctgatttctctgaggaatcttcatctccctgctctaagatgccttttttggtgtcagttgctatattttatgttagaagttgtcatcatatatatggtaattcttggttgtctgctcacattgaagagaagggaagggactacttttttttagatacataaaacgtatataaaggcactatgacatgatgtctaaaccagaaaagaatggttgagtgccatggctcacacctgtaatctcagcactttgggaggccaaagctgaaggattgcttgagcccaggagatccatactagtctgggcaacatagtgagaccctgtatctaaaaaaaaaaaaaaattttttttttttttgagagggagttttgctcttgttgcccaggatggagggcaatgacgacgcgatctcggctcaccgcaacctccgcctcccgggttcaagcgatctcctgccttaacctcccaagtagctgggattacaggcatgcaccaccatgcccagctaattttgtatttttagtagagatggggtttctccatg[136 bp omitted]agtggtgcctgcctactcagcagtcccagctactcgggaggctgaggcaggaggatcacttagcccaggaggtcaaggctgcagtgagctatgatcacaccactgcactccagcctgggcaacaaagcaagatgctgtctctaagaataataagattttcagcctattttccttatgttagcttgtcctttgtcccatttccagaggaacctgttgccactagttcatgagctttatgtggattctacagtagaaacttcattgaatcttggtttttcccactattggcttatgatccaactttcacaggtctgctaagtcagtcaccagttaccattcattcatctgctgtccagctggcaaaattttggtggtattgtatcctcttatgttctccctgtacttacggggactcctttctaaaagatctctttactgtcactacagtgtgatttcaggaggcagcaaaaggagattcatggatttcacccaccgttattagccccaagtatttcctctttattgttattgtttgtttgcctgctaattgtctgtcttcccctcttgaatgtaagttccaggataactcatctactttggttattttgcttaggtttttgtttctttttttctttttttctttttttgagacgtagtttcactcttgtcacccaggctggagtgcaatggcatgatctcggctcactgcaacctccgcctcctgggttcaagcaattctcctgcctcagcctcctgaatagctgggattgcaggggtccgccaccacacctgggtaatttttgtatttttaatagaggcggggttcgccatgt[136 bp omitted]cccaggcaggaatgcaatgtcgcaatcacggctcactgcagctgcaaactcctgggcttaagtgatcctcctgcctgcctcaacctctcaagtagctgggtctattggtgcacaccatcaagcctggcttttttttttttttttttttttttttggtagagacagggtcatgctatgttgctcaggctagtctcgaacccctgcctgacctcaagtaatccttccatctcagcctcccaaagtgctgggatcgtagacctgagccactatgcccggccccattttgtacacctatccatccccagcagtcagaaccatgtttgacacagagtcagtgttaaacaaatgaatgaaccaatttgctagcaaaagaaacgtactactcgccatcagggaggtggtagcagactcaggtctcctaactttccgggcagtgtccttcctaccacagcatggttggggtatgggtaattttgctaattaatgatatcagacagattataaagtgcttcacctggtaccaaatggtttcagaaatcttatctcatttgatcctgacaacagcccatgggccagatggtaaaagaattattattggccctaatatagcaatgatccctgacaggaactatcctgtaccatagaaatcaccgtcgctgctcctgacctctcacccatgtccactgtcatttatctgggcccttccatcacctcctctgcagacaggactgttaaggcttgtcacctctcaagcacttggtccccaagaatccaggactagctccttcataaagagggaaacgggtacagacaggggtaagtcatataaggtccttggagcaaagaagacatctgagttttgtgatgttacaggagcagaaaaaagaagaaaagtggaactgtcagatcagtagcaccttagagaagagctggatggagaaggaaggagaaggggcttagatcctggaaggagagagaataagtcccagaactaagagcggtatgtatacggtggggagagaggtgggatgaaaataaccatttaccataaccatagattccctttttttaaaatgaaatgaaaaatatcctagaatataatcacaaagccagttaaaaaatattctacacaggccgggcgggatggctcatgcctgtgatcccagcactttgggaggccgaggcgggagaaccgcccgagctcagaagcttcacatggcaaaaccccatctctaccaaaaaatacaaaatattagccaggtgtggtggcgagcctgtggtcccagctactcgggaggctaaggtgggaggatcacttgagcctgggaggcggaggttgcagtgagccaagattgtgccactgcactccaacctgggtgacagtgacaccctgtctcaccaaaaataaaaataaaaaattctggacagcaggttctgtaaaaccataacattagctcctgggatctgcttagtttctggatagcctgaactctgccctaagaccccagggaaaagtgaaagtaggatgcatggccccttccagggaagcaagatgtgactcaaaagtcacaccaggtcccaagggtataggtcacagagataaaggctgtaaagcaccccacactttctcattgtgctacctgccatcctcctcagattctgcctgccacctcctgggcagataaggctactacccgcctgcaaaccctggcaggtccaagcaccactcaggctgctgtgcctctgtgatccacacccagacactggaaatcgcccagaagcagaaacttagggatgaggaagttggcaagggggggtcttttaaccttgcattaaatcaagatgagtctttgttttttgtttttttgagacagagtcttgctctgttgcccaggctggagtgcaacggcacaatctcggctcactgcaacctctgcctcccaggttcaagagattctcctgcctcagcctaccaagtagctaggattacaggtgcccaccaccacacccagctcatttttgtatttttagtagagacagcgtttcaccatgttggccaggctggtctcaaactcctgagctcaagtgatccaccctcctctgcctcccaaagtgctggaattacaggtgtgagccaccgtgcccggccttcagtatgagtcttggtacggaaagaggtctgaaacatcttatgaagctacaatagcagttgtagaagagaataaataaaacagtactgtctataatcttaaaatcagtatagttatgtgtcacttaacaatggggatatgttctgacaaatacaggcaattttgtcgttatgcaaacatcacagagtgtacttacacacacctagatgggatggcctactgcacacctaggctataatggtatggcctattgctcctatgctacaaaccatggtactgtactgaatattgcaggcaactggagcacaacagtatttgtgtatctcaacatagaaaaggtaatgcattgtgctatgatgttacagcagctacaatgtcagtaggtgacaggaatttttcagctccattctaatcatatgggaccaccattgtatatatacgcagtctgtcaatgaccagaacgttgttatgtggtgcatgactatatatatatataataatagcagctgagtgtttttgagaccttcatacatgtgagcacagagctaacctctctgcatgcaccgttcaatgaattcttaccaaagcacagggacataggtattgccatgacttttctttttacaaaaagggaaattggccaggcacatggctcatgcctgtaatcccaacacttggggaggatcactcgagcccaggagttcaagaccagcttgggcaacatggtgaaaccctgtctctacaaaatataaaaaagattagccaggcatggtggcatgtacctgtggtcccagctactcagaagactaaggtgggaggatggaggctacagcgagttgagatcgagtcactgcactccagcctgggcaacagactgagactttgtctccaaaaaacaaaacaaacaaacaaaaaaaaggaactgagacttagagcgattgtggaataacttgtcctatatctcacagcaaataagtggcagggcaggactagaacctggatctgtatgactccggagtctgaattctcagcctctgctaggaaagcatggatgtgtacacatgtacgtgaaattcgcaaaggctacgtgacagtcaacaatggttacttaggaaattgggaggagggaaggtaggtcaactttctttcttttttttttcattaaaaaatttgttttttagtgacagagtgagactgtcactaaaaaacagtctggagtgcagtggcacaatcataccttactgcagcctggaactcttgacctcaagcaattgttttgcctcagcctcccaaaatgctgggattacaggcatgagccactgcacccggcctcattttctgctttacataattctgtactgtttacatttttcccatgagcatatattatttcataataaacacataaagcctggttttaagttgattctgctgaggactaagctctgattttttatcctgcccaaattcctatctaaggggcccagagaatcgtgccctaaaaaccataaattctcatcagttgggttttatttaaccctatatatcgtgacttactttccagtcttactgtggcataacgttacttgataaagaagaaagtcaaaatattttactccaaaatcatattttgaagtggccctgcaaagctgtcctttgtggggaaaatttgcatctgtaaagaatctctatcaacatagctagatctttttcttccaggccctcccaatcctgaagagattaactaagagtctagcaccttttaaagatctgaataggaaacatttgtcatctattgtctctaagggcagccactgtaagacttcaaaagaaccttggtctccacaatcttttaacctgaacatatcctttctgtcaatcccaggtctttagacaaactcaatcaattgtcaaccagcaaatgtttaaatttacctatagcctggaagccctgccccactttgaattgtcccatctttctggaccaaaccaattaatttcttaaatgtatttgaggccaggcattgtggctcacgcctgtaatcccagcactttgcgaggccaaggcgggcagatcacgaggtcaggagattgagatcatcctggctaacatggcaaaaccccgtctctactaaaaatacaaaaaaaaaaaattagccaggtgtggtggcgggcgcctgtagtcccaactattcgggacgctggggcaggagaatggcgtgaacctaggaggcgaggcttgcagtgagccgagatcgcgccactgcactccagcccgggggacagagcgagactccgtctcaaaagaaaaaaaaaatgtatttgattgatgtttcatgcctacctaaaattataaaaccaagctgcaccctgaccaccttgggcaaatgttctcaggacctcctgggggctgtgtcacggggccatggtcactcataataaatctcttcaaaatattttacagtttgactcttttcatcaacactgttcaccaaacatacacagagaagaaaactcaaattactctagcgtttaggtcctgttaactgaccaactactgtgagctacactgagggctaagcacttcacgtccaggacgtcactgaatcctcacaactgggtctggagggagggtattttcattaactcccttcacagaggaggaccctgaggctcaggaatgtgaagtgacctccctaaggtcacataacaacttaggaactcaacttaggcctgactggttcctgagcccatgcgtgtagctacatcagtatgttagcggcgcaggaatgatgacaatgataataacagcagtttacgtgcttgctatgtggcagccctgtgcatttcatgtataatctcatcacatctccatggcaatccccgttttacagaagaggaaactgagcgtcagcagagagaagtcacttgtttgcccagggtcatccagcagaattgagactagaacccaaaccaccggcatccatccagtggctcaggccaaaatctcagtagccatccttgactcctccttcttcttcctccatatctaatccattggttctagttggcttcagttttcaaaatacatgttcacttctcactatctgactactgcaggccccatggaagccaccgccgtctctcttccaggccagtttgaaagacttcctactgaacgccctccctccattcctgcctcttgcccccaccccatccactctctacattgcagtcagagtgatctttttcaactcttttgctaaatatctctcctgcaacctttcttagggttttgggagacaattaagctctgcagagaatggtttgagtgattgttttcttgattttcccaaggatgctactagctaataccattacttactacagtaggagataacttaattcattacatgcaatggatgccttagagtcttagggcttaagtctaccgggaactgggtggagacagctgcaaaagtttcctgtcacatttcaaataccagtgaccatggcctacaaggcccctgtgacctgccacccaccacaccttgacctctgcaggtacatttccaactacccttttcccaagcacaagacctcttctccctacctcaatcatagaagtctcattgctgccttagagcttttgcaggggttgttcccacaaccttgagccctgcccaagccatccagagcctgctccttttgtcagtcattcagggctcagttcaaagaccaccagctcagaggggccctctcggccacctgaattaaatgctgccaattcctgctgttttatttcctttatggcacttatttatcataatctgaaagtacctttgcttgttcactcaactgttgtgtgtctcccaagttaaggctgagctccatggggcagaaaccttttcacagggaagcaatctgtaaaaatatgtttagagaatccatcagatatctattatgagccagtcactgggttaggagctttgcaatgaatcctttttatcaaccccaacattgtccaatagatatacaatataagccaaggccaggcacagtggctcatgcctgtaatcccagcaatttgggaggttgaggcaagaatgacccttgaggtcaccagttcgagatcagcctggacaacatagcaagactctgtctctacaaaaattaaaaggggccgggggtggtggctcacgcctgtaatcccagcaatctgggaggccaaagcaggtggatcacctgaagtcaggagtttgagaccagcctgaccaacatggtgaaaccccatctttactaaaaatacaaacattagctgggcgtggtggctggcgctcgtaatctcagctactcaggaggctgagacaggagaatcacttgaacccaggaggtggaggttacagtgagcagagatggtaccattgcactccagcctgggtgtcaagagcgaaactctgtctcaaaaaaataaaaaaaaataaaataactttaaaaaattaaaagaaagaaatgtaatgtaagctattttttaaaaaatccaagcctcttggattcaagcgattctcctgcctcagcctcccgagtagctccaggcaccatttaaaaatttttaattgtctaataatcaaattaaaagaagtaaaaagaaacagacgaaattaatatattttatttaaaccaacatgttcagaggattatcatcccaacatgtaattggttaataaagatatgaatagatgacagatggatggattggggtgtgtatgtgtgcatgtgagctcctcctctataccttttctgggttctgagaagctcagcggcttcgtcgctattcggggactcacgggcttgcccttcaagacccagcctcaaagccccagacactgcatctctgctttcccgccttttctgtacctgtctccatgtggtgctcccttcagggcctgcacacagggaagggagggccgtcctcccgcgaggcctcaaggtgcctatcggtgcagtggctcaaacaaaacaggtgtgacaaaaggccaggaatgcctcccaggggctgaggcacctcagggagcgtgttagaagaagtggacggtaaaaagagagcgtccgggccaggagcggtggctcatgcctgtaatcccaacactttgggaggccgaggtgagtggatcacttgaggtcaggagttcgagaccagcctgaccaacatggaaaaaccctgtctctactaaaaatacaaaattagccgggcatggtggtgcatgcctgtaatcccagctactcaggaggctgaggcaggagaatcgcttgaacccgggagttgagattgcaccattgcactccagcctgggcaacaagagtgaaattccatctcaaaaaaaaaaaagagcgtccagaaccaggacgcatgcgcacattagccccgactggaagtgcatgaggacagaagggaagcagaagttggggctgaggtgttcctgctgagaagagtgatggatgtaaattttgaagctctggatcctgcccacaccatggagccaagaggaccagaggagtcagcattgaactggaaatcaagttggaactgaaaattgacttatccacaaatagtaagaactgtgaatttgggcctcaaggagaggaaattttattcctaggcagggtcttcttgggaaggcagccggacaaggcttctctgaagtccagtaaggttttgggaggtttcattgagaaactgaatactgagaatgaaatgctgagaaatgaacagatgcaacagcaaaattttttccaaaaattgtgctgtgttctaaatatttacattgaatgaatgatacaaaaatatactcaggtcaatacagttgtgcagatgatcggatttataagaaataacgaggtgacctgttaatgagagataatttttttttttttgagatggcgtcttgctctgtcgcccacactggagtgtagtggcacgatctcggctcactgcaacctccgcctcttggattcaagcgattctcctatctcagcctcctgagtagctccaggcacgtgccaccatgccgagctaatttttgtgtttttagtagagacagggtttcctcatgttggccaggctggtgtcgaactcctgacctcaggtgatccacccacctcggcctcccgaagtgctggcattacaggtgcgagccactgcacctggccaatgagacacagtttttaagttgtacagtgaatgacacttcgtggtcccaatccagttagcctacctctgtgactctgaaaaatctcatctcgagataacttaaggagtgaaaattgaaagtcttcctagtttctgcccctattggagaggggccccagatgttctgttaggaattagtaagcaggatgaccctgagaataagccacaagaggaatctgtgataactggacgtcctgagagattttctcatcagatcaccagtgctggagggacatccaggctccatccctgatgctacattgggaatgagtgatgaggggtgctctgtatggggagtgaggtttttcataatgtgcgagggtttctggctagaacaacaaataaaacaagattacgttgaataatcagactggcaaggcctcttggaggaggtgtcattgccacagagacctggatgaagtgagggagcaagggaagaagggaatgagtcatgcaggcagagggaacgtggccttttgaagagcccttgaggaggctggaatggggtgcagagggctggagcaaagtgatcaagatgggagggggaggtaggagatgaagcccatagtaaaatctatggggttttattacgaagtaatgggaaatcatgggagggtagagagtagagaatagagggagagcatgaactgatttaacataaaaagggctttcggggaggggtgatagaggctcagtaggaggctaaatacaaaagcggtcacttgctgtagggggcgctaaggagcattacctcaggtcaccagcctgggaagtagactcaggtgcaggtgagggaaatgaggcatctttccatgggagagccatggggatttttgtttgtttgggttgtcattgatttaggggaggagaacccaggaatgttgtggtcagttggtctgttgggtgtcagaaaatgtagtgggaggtcttaatgggatgatagtcatcaagggcggggtgctgtgttcatttctcaggagcatctgaggccatttcaccctgttgaagttctcgggccgcctccacagtgccgccattgttggggtttgtaatgaagtaaatcaggctctcaggagggactatgtttaggaggtaacatgaagagcaccccgtcagccaccagaattctcaaccttgtccctcacagctgaatggctttggacagattgaagttaaggtgtctttattgtggttgccttaaaatattatgttaggctgggcatggtggctcactactataatcccaacactttggaaggctgaggcaggaggatgagttgagcccaggagttcaggaccagcctggacaacatagtgagaccccatctctacaaaaaattttaaaaattagtcaggcgtgttggcatgcacttgaagtcccagctacacagaaggctgaggcaggaggattgcttgagcccaggaggtcgaagctacagtgagctatgtttgtgtcactgcactctggcctgagtgacagtgtgagattcagtgtcaaaaataaataaaataaaatgttatgctatgaagtatttcaaacacacataaagatatgagaaaccatattaacaaactcctgtgtacacattcctcaattgttttttttttttaattatttaagacggagccttgctctgttgcccagactggagtgcagtggtgtaatctcggctcactgaaacctccgcctcctgggttcacaccattctcctacattagcctcctgagtagctgagattacagacacatgccaccacgcctggctaatttttgtatttttagtagagatagggttttaccatgttggtcaggctggtcttgaactcctgacctcttggtctgcccacctcagcctcccaaagtgctgggatttcagatgtgagccaccacacccggactgcgctcttattttattgctggacagctaccattccaccatgtggtccaccctattttacacatccattgttttttttttttgagacagagtctcgctctatcgcccaggctggagttcagtagcatgatcttggctctcagctcactgcaacctccaccgggttcaagcgattctcctgcctcagcctcctgagtagctgcgattacaggtgcctgccactacacccagctaattttttgtatttttagtagacacagggtttc[131 bp omitted]ttttaagccagggtctggttcagactggagtgtagtgttgccatcatagctcactgtagccttgaactccttgggctaagtgatcctctcacctcagcctcccaagtagctggggctacaagcatgcaccaccatgcctggctaattttttcatgattttttggagaaacaggggtctcactatcttgcagaggctggtcttgaactcttggcctcaaatgatccacctgccttggcctcccaaagcactaggattatagatgtgaaccactgcacccagccaacacaagaaactaaaatagttaaaaattctagggctctgaaatctaatagaacctgagttgaaagcctggctctgctatttcttctgtgggtgctcttaggaaagtcacttcatctttatgggcctcagtttcctcatctgtcagaagagagcaagtgaatacagttgcaaatattatttctctaagtatgactctatctgagtcattatctaagtggagttttatagcataataataacagctaccttttattaacatgaaaaaatctaggctaacatttactgaggttttctaaacccttgtgaagtattgctattattcccactttacaaatgatgaaactttggccctgacagagtagccacccagaggtcacgtagctagtaaagtggtaggaacagaatttgaaatcaggtctgactgattttataactcatattctaaccgctaagttgtaccaccttaaatgcctccagcggatacttagcagtggtttccaaacattttttaaggaatggaaacattttttttttcaagcaaagtcttaaatgaaacagtaggttataaagcaagtgaaggccaaattacaccagttaaagcagggataatgcaggtacgggttcaatcctggctctgccgggtcctggctgtgtgagcttgaacagattacagtctccgtcatcacttaatggtggagatacgttttgagaaatgaagaacagcagagtgcacttacacaaacctttatcgtatcgcctactccacacctaggctgtgtggtatagcttatggctcttaggctgcaaacctgcccagcatgtcactggactgaatgctgcaggcaactgtaacacaataagcatttgtgtttctaaacatagaaaaggtacagtacaaatatgatataatcttttgggaccactgttgtttatgccgtctgttgttgaccgaaacgtcattatacagagcatgactgtacttatctctctgagattcaatttctttgtttgtaatatggggataatgatgccaacctaataggtttgttttgcggatcaactgagataatatatgcaaagcacttggcataaagcctggcgcgtgataagaaccaaattaagaatggctgctattgaattgtggctgtggctgttaccaccttcgggactgtctttactgacgatgggattgagtggaaatttttcagccccccatcatctgacccaacctgcatttccaggcctccacgcctacgggatagcccggctgaatgacagcgttcccagtccagaatcccgcactaccagttcttcgtgctctgcccactggagggccctcttcccccctccctcctctaaaagcatactctggaaattttttgaatattttaagaaactgttattgtagaatatttcaaaatttgcaaaaataaaaagctagtataatgaacctcgttttttattaggtaattaccgaccttatttcttgtgtaccccaacctgttccccccactggattattttgaagcaaatcctaaagagtttattacttcagacatagatttatcattaggtatctgcaaggtaaagactcttttttaacataactacaataatattttcacatctaaaaatataatttctttttattttttttattgtttcttttttttaattttttttttagagacggaatctcactatgttgaccaggctggtcttgaactcttggactcaagcaatccacccacctcggcctcccaaatcaaagagctgagattacaggcgtgagccgccatgcccagaccaaagatgataatgtcttattatcaatatgtccgtgttcaggtttccttcgttgtctcctaaatctttttctctcccagttggtttgttcaaattaggatatagacaagattcatatgttgcatttaagtgatgggtcccttcaatcaacttttttttgagactgagtcttattctgtcacccaggctggcatgcagtggcacaatcttggctcactgcaacctctggctcccaggttcaagacattctcctgcctcatcctcccgaatagctggaaataacaggtgtgcacccccacgcccgactaatttttgtatttttagtagagacagggcttcaccatgtaggccaagctgattttgaactcttgacctcaggtgatccacccccctcggcctcctgaagtggtgggaatacaggtgtgagccaccatgcccggcctcatcaatttttatctttttttcccctttccctttttttctacagtggctttttttttttttggatggagtttcgctcttgttgcccaggctggagtgcaatggtgcaatctcggctcactgcaacctctgcctcctcctgggttcaagcaattctcctgcctcagcctcccaagtagctggaattacaggcatgtgccaccacacctggctaattttgtatttttagtagagacagggttgctccatgtgggtcaggctggtctcgaactcctgacctcaggtgatctgcccacctcagcctcccaaagtgctgggattataggcgtgagtcaccgtgcccgactcttctacagtgtttttgttgaagaagctggattatcagttttctagaatttctcacaggaaatgccaaggttggggggagttattaacatctttcctgtagaatcctttactgtgttcctctgtgccttttcatccccctgcaaactggtagttagatctagagtctagagttttaatcaggtttggagttgatttttggcaagaatgcttcctatgtggggccctgtgctttctgttgcatcaggtctgcagaagcttgtctcttctctctctgggtgttggatagatacatgggttcactggttgtgagcctgatccaccaccataaatttccccatcagcatttcacctgccgggtttggcagtcattaatgtgaagggattagcatgtgctactccaaagtatgctgctttagcataaggattattttgagtagaaggcaattaagaagcagcagacagaagaggaactctctgtcctctccctttctgcctaaagcagggtatacatttcccatcaggtagaggagataactcaacgctggagacttgaatctgcataagcaaatcttgctaaataaccctttatcttccattaatttcccctgtatattttacttaccttcccacaatttacatcacctggatgtccaaatccctttttcaccgttttgtcacttttccacaattttttttttttttttttttagacagagtctcactctgtcgcccatgctggagtacagtggtgtgatctgggctcactgcaacctctacctcccaggttcaagggattttcatgcctcagctcctgggtagttgggattacaggtgtgcaccaccacacctggctaatgtttttgtatttttagtagagatggggtttcac[131 bp omitted]aaacggtatatgagcctcaagcctggccacttctttaggttttcacttcttttctgtgaagctcctggatgcatgcataataagccttttctcctgctaatctatcttttgttaatttttttttttaagatggagtctcactctgtcgcccaggctggagtacagttgtgtgatctcggcttactgctacctctgcctcccaggttcaagcaattctcctgtctcagcctcctgagtagctgggactacaggcatgcgccaccatgcccagctaatttttgtattttcagtagagatggcgtttcaccatattggtctggctggtctcgaactcttgacctcaggtgatccacctgcctcggcctcccaaagtgctaggattacaggcatgagccactgtgcctggcctcttttgttaatgtaattagcatgccacagccactgaacctaagacagtagaaaaaaatgtttttttccttccctacagatgctagcctacattcattattttattaaattttgaaaaacgaaaatattctattatttcttttgcatttattagtttcaaattctcgtataaagaaaaattgtgccagctgggcatggtggcgcatgcctgtaatttcaacactttgggaggccaaggccagaggatcacttgaggtcaggagttgaagaccaccctgggcaacatagcaagacacccatcctacaaaaaatttaaaaatataccaggtgtggtggcttgtgcctgtagttccaactactcaggaggctgaggcaggaggattgcttgagccagggaggtgaaggctgcctccagccaagatcatgccactgcactccagcctcggtgaaagagcaagacgctgtctcaaaaaaaaaaaaaaaaaaaaaagagagagagagagaaactgtttaccctgaagtatatagttcatagaggaaagtaaggatgaatccttgattcatttcctttatttaccagttttttaaatgagttgattcccagaagcctcccaaagtaatcacttagtttggctttggtttttagtccctttatgtcctggctgagtatgacagggactttttttttttttaagttcatttatgaatgccaaattcaaagttactttccccagttttcttaccctggtgcaaaactatctcctcccttctgtcagatttaaacatatcgttctaaggtatctagtgccttctccctggatgcttcctttatcgtaagtatcaactggatcataactccttgaaggccttctgcatagcactcaacatcatgcccaaggccgtgcttctcaaacgttattccacatgtgaatcatccaggggcaggggtcttgttaaaattctgatgcattagctctgggtgagcagagcttctgcatttctagcaagcaagcaccaagtgatgctgatgccgctggctcggggaccacactctgagtagcaaaagggtgtggtaaatgtgagaaatcagtttcattcattcagttaagaggcacctactctgggtcactgcatggactaggccctaccactttacagtgcaaagcgtttttttggtgtttgtttgctttactagaaagttttgattttaatttattcttttgaatatgtaatttgcacatggtaaaacatttttgttcataaaatccaaaagggtacacagtgaaagtatctaacttttcaaaagttatcactgttacttctcaagttttattccagataatagcagataatatgcagataatagcatatatttgtaccatatctttattttaaccacatggcagcataatgatctgccactttctttttttcattttactctatcttggagattgtttcatagctcagtgtatatctctacatcctgttgaacagatggtatagtatccacacaagattcatttgttggccaggcatggtggttcacacctgtaatccctgcactttgggagtccagtgcaggcggatcacctgaagtcaggagttcaagaccagcctggctgacgtggcaaaaccccatctctactaaaaatacaaaaattagccggacatggtggcgggcacccatgtagaagatgtaattccatcttctcaggaggctgaggcaggagaatcgtttgaacctgggaagcagaggttgtggtgagccaagattgcaccactgcactccagcctgagcaacagagtgaaactccgtctcaaaaaaaaaaaatgcatttgttattgtttttataaagtataaaatgaagagtgactacttcctgccttttattaaataaaggttatttaataagatttgcttatgcagattcaagtctccagtgttgagttatctcctctacctgatgggaaatgtacaggtcatccccagggagaacaggtgctatgtcttccattctttgaatcctctgaatggcctgacccatgtttgtgcattttgtcaatttcacatgatctagctagtatacatctgtcactcatgtgcacagcttgtctacacttcactttgtctttttctttttggttcagattgcagtctctctagactccaattgtttcttgactgtgtattctgtcagcacttgcaaattgatctggtgttctctggctttaataatatgttattgtgaaatacaacatgcataggtgtgcataaaatgtacatatttaaagaagaaatgaaacatgatatagaagtggcttctgtcacacaccgtccccccttatctcctatgtgccactctcctatcacatgggatctctccatctaaggggcaactactatcctgattctgggttaatcttaagttctctgacgttcctttttgaagtggttctcagactttagtgaatcagacttgcttagagggcttgtcaaaacacagattgctgggccccacccctggtttcgcacttagtagatctgaagtggggcccaagaatttgcatttcttttcagttcccaggggatcctggtgctgccagcgtggggaccacactttgagaactaccgccttatctcagagatactcttaacttgtgtatcgtgactcctagtcccctggggatgctttactcctcccctaaaacctagtcactcgatgggtgtcccttaagcacctcccctcttcttcctgtactccatttcctatcacctagtttgtgagtgcacaatcttcactaagtatttcaactgattgtggcatttcaccagtgtccatagttttcttctctgttggttattccatttatagctttcctctcctttgtgtgtattggaaggaagagcataagcaactttttttttttttttgacagagtcttgctctctcaccgaggctggagtgtagtggtacaattttggctcactgcaacctccgccttccggattcaagcgattctcgtgcctcagcctcctgagtagctgggattacagacatgcatcaccacacccggctcagttttgtatttttagtagagatggggtttcaccatgttggctaggctggtctcgaactcctgacctcatgtgatccgcccacctaattttgtgtttttagtagagatggggttttgccatgttacccaggctggtctcaaactcctgacctcaagggatacacccaccttggcctcccaaagtgctgggattacaggtgtgagccaccgtgcccggccaggaacatttacatgtctcattcacctggtctgtaagcgccttgaaagtaggaaccaagtttaatttcccttgtagtccacttcctcgattaaactgcagttgatggtttacaaacgcagttgcttataaaggccaaaggcaatgtaaacaagtgaagcttgccaagtagaaagttccctggaagccatgtcctgtgtaaagagggcagctgctacttggctttaagccagtcgcaggtccactgttctctaatcttcccagttttcaagagaaaccagaaacaattccaactagtttagtattttaagtacacaaattgggtcagagaaaatacatctacaggaagcaaaactaaatccatttcatgtttcaagatctttgcagtggatggatggatggatggatggatggatggatggatggatggatggatggatgggtgggtggatgggtggatgggtgggtggatggctgggtggatggatggatgcgcgagtgaatgagtgaatctggatcattgcggctgctctctggttgaaactgggggagtagagatacactatctactatatgcctggccgtgtgcaaggggctttatatacttatgtcatttgaccttcataacaacaccacagagtggttatcattcttatttatctccatactcatttcacggataaagaaacagaggcttaggaagactcaaggtcacgctgctagttttctttatttagagcccacctaattccaaaaaaaaaaaggatttcagatgggctcatgtgattgaagctgggtcctgaactttggatttcagatagctctgttacacaaaatcgccactacaaagggaatcaggttttcagaaggtaggtaagggggaatgccaacaggtcagggagtaggtttgatttgtgaaaggaaaataaaaacttgggaccccaattcactctgtcgaaaggaaaaaagataagccgaaagctgagacatgccagaagctgcctttccttttgttcctaaacagatagctacaggtaaaaggttaactatctcaacagatagctattctatgttcaccatatcttatgtaaactgctggatttactgagcatgagacaaatatataatggactattcccctacctgctccttttctcttataacatgtggattcagtgatgtgaccattccctccctctttccccgcttttcccctttaaatactgaagctctcaaaatcatctttggagaaaggcacagaccacagactgttcctctgattctgtatttttttctccccggcattgtccttaaccttggcaaaataaacttctcaattgattgagacctgtctcagatactttttgggttacaaattggcaacccgtgaatggcctctgaatggaggtggccctgacctctgacaaatctatcgttgcttggtactggtttgagctgtctttattgctcaaaccaacaggacagttttctgggtccaggagctcccccttaagagaatgagacctgtctcagataccttttggtttagagattccctgagcatcttactaagcaagtcatagcttcatgctcctcaaggatcccagccaacactaaggagctaagacacaagggggtctcttgccatcttggtgtgtcctttctatttcctcctgtctccctacttactctcctcttggaagtcaagatttctacctatcagccttggggctcattccatcttaattcctttgtaaagcccagtaggaggacagagacgcagatacaggagctgttggatggaaaatgttttattggagttcctgaggcaggaaagagttatggtaggttgagaatcagcgctcacgctagccccctcttccagtggaggtcatggtcactgggcatcaggagttgcgctcctcagtcctttcagctagagggagaggggtcagggttagatggggaacccgtgggtgcccagtataggatggcatggatggaaaggaatttctgcctcggtgtgagttcccgttctcctctatatgtagtagctaagacctcccttcagtttggtgagaaggctgatcctcctttccctgtccccactctctctcccatatcttctgcttcttcccttacccccaagctccataccctcctaatgcccacacctcttaccttaggaaaggcatcccagttgaggaaaggaagtttccttttgatagactaaaagaaagaaagagaaagagagtgatgtgttgcaggtcagccgggcatggatgggtaagcattcccttaatgaactcccacagtaaccatagtaacaataatgtcattattttgtcattactttatcaagagctaatatttcctgaggccttagtctgtgtctgccttgcacgggctgctctacaagcatgatttcagtgggtttttacagcaaccttttgtggtgggaattgtcatcatccccacatcacagaggaagcggaggccgagggagctgaaggcgttcgcatgaggccatgtgagaagtcagtgcagagtcaggagacgcgggccccagctctgtcgctgactttgccttctaagtgcgggtgggcctcagtttttccatagaggatgaggggattcaaataaaatcttgaccgattagcctcttcctcttctgcaattgtccttggggccctgctcctccaccaccatcttaggaaaacacgggtagccaggactggcgccgggggaagctttcttccgttgacagcccattgggcagcatccaggcaggacagtcactccctcccagagatcaggaaccaacccatacatttaaagccaaaatgtgtggccactaccctgggatgactgcagacaaccgaggagggcaaggggcgccggagcactcacctcaaagagggcgtgccagttcaggaactcatcagccttaaacgcctgaggaggaagagagacagcagaagcaggtcagctccaggggaggccagagcttagcccccagccctctggagaaggtgaaggaaccgtggcagctttgcaagctctctaccaaggcgtttatcccctctgtgatgagggtattcgtgggggtagcaccagagaagcgtactcacagatcgcaatttgtcgatgttcaggaacggggtgttaaaggcctaggcagaaacgcagggtgttaggaaagttgctaagaagcaaaaagagagagaggacagactcgtggctggagggccggggaaaacagacggcttacctcgggtcgtgacgcataattctcaatggtgctttcttcctggaaaaggagagggagaaaaggcggcagggggtcacgtgatgccagggcccttgcccacatccctgtctgccagctctgccttcatccacagcccagtccccgaaagaacgcaacccattccccaccatggtctccgttccagtcgcgcacatggttggcggatgtgcagggtgaggagggggaattggagaatggtacatgtaagcagtgtcaccatgggcagcaggcagaaagcctggagccgagcattcctctccggaaaagctagctagtgctgtcctgcagttgacttaagtctaagaggtggggtgttctggagacacccacgctcagtccgtatagctggatgggaaagatttgcgagcaggtgggagcccagctgctgaggtgacccgcctgcctctcactgatcgaggttgctttgctttgtggatttattgccaccactgttggaggttccataatccccctccatggggaccccaccccaggcctcagtgtgtcccatcgtgtcttccccatgacagagcccaacacggagcccgcaggctggatccagatgcttagatctcataaaaatttggtcatttgttttttggtttgaattagacattttgaattagtaagaattcataaattcatccagatttctagtttcccctgaaaaatgtaaaactctaggcacatcttcccaatccatggcgtcaggtggggtgaaagctgccctttcagactgggaaagttggccccatttcacctcaggccctgacagcccccccagctcagtgacaccactggcttggtccttagcagctgagcctgtgcccctgtcttagacttttaaatccggaataggcatcaggattcctctctggctgaggactggatggtaaagattctcactgtggcctatgctccagagacagcagggagccacccgtcacctgggcaccactcccaggggcacaaatgaagcaaagaggagctaagcaggggtgtctccagaacaccccagccccactcctctttgagttaagtcagctgcaggcagaactagctagttttttgctttgcttcaccctctccacctgctgcccatgtggatgcaggcctgggtttggagctgctctgcctcacattgccgttctccagttccccctcttcccctgcacgtccccaggcatgtgtgcagctggaacggaatgggtgaacactcttgagagcccatggtggagatagtctgaacccagaccacccactcagtcccaaggttcagtacacgagcctccccaacacacttcaccatcccttccagaaagaggagcatctctgtcccaaatgtctccccagggatgctctgttccctcctcccttcctcagagccccagtttcttcagcccccatcagaatccaaaactaagagccacttatccaggaatggacaggaggtagagagatggaggggtaggtgggtaacacgtataagaataaaaatgcaggtgacgtgctcacctcaggaccacccagggtggctccctgggcagagtggagcaccaggagggagaggagcaccacggcaggaaggaccgggatcttcatggcgtcaagtttggggtgctctgaggcggggcctcagtgcttgctctttatattgccaaggaggcagatgagcacagaaatggggtccccaccccactgactcacccccagatcttgtcgcccacccccggggctctgggagggggaggcatggactgttcctcatttgcctcggatttctcaattcgcattctgccccaggcacgtggaaggtaacactgcaatgggtctcttcatgcagatggggctgggacagagacaggttggacctgtccctccaagggattggcagtggtacccaagcaacctctccttttgtctttgtctcttttcgttatatccctcattcctctcttagaattcaggctttttcttttcttttcttttctttttttttgacaggctctcactcgttgcccagactggagtgcagtggtgtgatcacagctcactgcagccttgacctcccaggctcaagcaatcctcccacctcagtctccctagtagctgggactagaggcacgcatcacctcacctagctaacttttttattttcttgtagagatgttgcagctttttttttttttaattttctcgtagagatgaaaatgtctcgccatgttgcccaagctggcctcaaactcctggactcaaggggtccgcctgccttgacctcccaaaggactataggtgtgagcctgcgctccatgctcattcaggccttttcttccaccctaccaaaatctatgtaaactctttagcttggcattgaaggtggtccatgctctgaactcaacccacctttataacttcttcctttactagctttgtacatacctcacattctggccaaattagaccccttaccaactatatccttctttttccctcttcaaagcatccggccatgctgttccttattcctaacatggccttctctcatctccagttctcagaacccaacactcatcttggatgaagcttcccagatttttcctgcaatgcccagtccttctctccacacctttcctttcacagaattcccatattcattcgtttgtatgtctctggcattgtatctaagtaagtcatgttctcgccttgtttcccttttagagtatcaagttccttgaggtcaggagctgtatcttgatcagctttacatccccctagaaccatggctcacacagaacccaggtagagtcagcattggtcagatatgatacgttagacttagtattcaggcatccttcagccacagtgtacattttcctttcatggggctgaacctttccattttccaactgcccgtcttttactcttgggtcttcagagaaatgactgtcttgagctaagatgacaaggaacagggaacaaaaaacagctcttagggtgcccagttggagatgggatccaggtaccctgaacctggagtgcccactccatgtcattgccctaacccaccttgccccacccccagtttggaagttggatcacctcactgtgacacaatgtcctagtcaagcagccttctccacagtgaggttcaggtggccaaaccggctcctgctgtaacagggaggggctgggacatggaccggcgctgtcagggaaaagcaagaccttatcaacacaacctgatgcaatgcacggtggcggtggccctgggtgggagggctggacggcatccatgaacaacctttacgaaccccagaagctgggcacctcagctccatcctcacgctgcccccacaccccagtcccagacatcctcttcagcctcctctgattttataatggcagcttcccctttgcagagctacctgagggaacactgcttagagaacactcccttagcccagatggccacacagtagtggatgtcacagagttggtgctcctggaggggacgagttagagaatgactgaggtgggtggagcacctcccaaaaggttttctggaggacacaagttctgtgtaatgaatccttgctaattaacgaacagtgactgaaaaagctcattagccaccattccatccgcatagggtcgactccagggagtgaagaatcagacaaaagagaactgatgttgtataaccagctacgatttgacaggcgggtgaggggacccagtgccagttttggcctgggtgatctagagcatcggtcaatccaacgctgtcttctgttttgctctagagtctaatctgtgattttcctttgacaataaattgccctccctatgttttcctctccacccgatggtattgataacaatgttagctgagttactgaggcttactatatggcagaccttgtactaagtgctccaaatacgcgatctcattgaaatgtcccagtgattctgacacaggtgggtactataattattcacattctataggcgggggaaccacagcatatagaggttaaataactcaccccaggtcacacagccagaatgtgacaggaccagcattagaacgctgggcttccagagcctgaacctatattgctcctctctatgctggacaggctatgttacagcacatgtaacaccctgtgtgaattagacccatgtcctgagagtggggggcagactgcatcgaacccccacaggtcccctttacagtgtccattgtggtgcatagcctgcaccatcagaggtggcagccccaagcataggtgcattcatttaaatgaatcaaactgcacactcttgacaaaatgaaaacgaagaatgaaggttagtggcatcagcccccgaatgaacctgtgattgcctccgtttccagatgcctccagtagtataatcatcttgccacaccaagtatgtgtttacagatagggttccgtttctggatctagtgttcaacattctgctgtttaaaaataggtactttttgtatcatacctctaaacacaggccaactgctttgtgtgctcaaccaaagaaattctcttcctatgctggaaaaaaagctgtctgtgttggactcatgatttgtttccacttggcatcttcctggcaccttctgagggtagttttttggggttttgtttgtttgttgttttttgtttttgagacagagtcttgctctgttgcccaggctagagtgcagtggtatgatctcggctcactgcaacctccacctcccaggaggagtgattctcctgtctcagtctcccgagtagctgggatgacaggcgtgcgccgccacacccagctaatttttgtatttttagcagagacggggtttcaccatgttggccaggatcgtctcaaattcctgacctcaagtgatctgcctcggcctcccaaagtgctgggatcacaggagtgagccacggcgcccagctagttccatcttgacgtgatttttgctgtaagcggccaactttagaagccagtgtctctctccaaactcctccctcttcctccatctacgctgcctgagtagtttgtgttccctgagttgggttgggcagatggggaaagagaggggcagggagttctccctgggagagggtcccagcagttcaggtgatgggctgcaggaaaatctgcccgatacgcagctcagctttggatgaatcacggagggttaatggagtcaggcagccgcagagactggctctgcaacatcacatctccaggtcggcttgacttcctagctccctcactgagaataccagtaaacctctgttttcccacaggcctgcccccaccccaccccaaatctgccagaacttgagtgtgggtaggaggcgaggcccagcctggattgccccattgtgagacacacctagggcctggcagccagcctcctgggtctagggagggagtggggattccaagagagagacactaggttttcggggccttggcgaacactaggtgggaagccgggaatcctgggagagagaggggactgggatgtggagtattagggggcagaactcagggcatccctgtcccatcccttcctccctccgtcggtgttgtcacaaccaagaaagcagcctcatccaccagcaggtgtggtttcttcctttgccgcccaccctatgtgcccggtgcttaaacctctcccaggaagtcttcctggattggtcccacttaattccaatccctctctccattggctaatttgtaaatatttatttggctcttggtactgggggctgtagatggacaaaagacctgccctacagatcccatgtcctagcgaaggagacatcataatgtaaccaaaaatagatacgcaaacaagatgacttcagagaaggacaggtgctgcgaagaaaacggggccatatgatgctgacagggtttccttggtcgatggcctgagggccgagtgcggtggctcgcacctgtagtcccagcactttagggggctgaggcaggaggatcactcaagcccaggagttccagaccagcctgggcaacatggcaagaccccgtctctattaaaatacaaattttaaaaggtggcccagggagggacatttgaaattagtcctaaaagcagatgaagctctggctttctgaagaccttggtaacagccgcccatgttccctgatggcctgtgccagtaggcccagagggacgttagagagggaggccaggcccatcgcatagagccgtagtgaggaatggggattttattccagggctaatgagaagctggtggtaggttccgagcaggggctccttctagggcgttgtggaagaacgggatctaaagaataagatggaagttggggattcaggaggtcactggaggagccctgaagggagaaaggggtacccacccttcactggagggcccctcatgccaggggaccttagcctgcctcgggtgtcactctaagctttcaagagccgctttcagctctttgggccaagaacatctcacgagccaagaaccgtgttgctcacctccgcgtctcccccggtgcctcagtgactgggctgaggagacttcagctccccacgggtttccacccccacccacgctccgggaagctctctgtgcagcgaggacggagcgtcctccctgggagggccccgcgctctcccccctgtggcctctaggaggtactgcaaggccctcctatggcgttgaactccggaggacaagtgcaaaccagcatcaggatttcaggacccaggagagaagggaggccaagcagaggagcggccctcccaggcaggccgactgggtcagctcggtctcctcaagtcagttttgggccgggtttctttcacgtatacatgcactgtttgaggccctgtgcctgtcctgtgggtggagagtgacctaggcagatgggggccatgccctcagggaactcaaacctggagggagtcacttaggctggcagggcgcctcctgtccaccttttacttcctgtcccctgcagggatcccagggggacaaaggggtgggggatccttaatccgggcatgttggaccagcttggtgggacttaggggctcctactgcagacccccagcccagtcccaagggctcttcagcgtgggataagcctggctcagcctgcgccgcagcctctcctgtttcattggtacagtgatggggtggaagtgttctgcctccctccctctgcatcctggaaacacagggcagtcagtgcccgtgataaggccctgggttagatccagtgcccccaacttcctaagcgcgtctccccaaccacgcccccatccccacggcagcctgtccatgtggagaagcacagtctctatcagcacctcgctcctgtttcctgccctctccctgaccttctgggactgacctcccgttttgaacaacctctttccccctgctcctgacttgaatatttccattgtcgctttttcaggccaacaaaa[136 bp omitted]cggtgaaaccccgtctctactaaaaaatacaaaaaattagccgggcgtggtggcgggcgcctgtagtcccagctactcgggaggctgaggcaggagaatggcgtgaacctgggaggcggagcttgcagtgagcggagatcgcgccactgcgctccagcctgggtgacagagcgagactccgtctcaagaaaaaaaaaaaaagaacagtattcaagccgggcatggtggcttccgcctgtaatcccagcaactttgggaggctgaggcgggtagatcacctgaggtcaggagttcaagaacaccctggccaacatggtgaaaccccatctgtactaaagatacaaaaattagccaggtgtggtggcgcatgcgtgtaatcctagctactcaggaggctgaagcaggagaattgcatgaatccaggaggcggaggttgcagtgagccgacatcgtgccactgcactctagcctgggccacagagtgagattgagtctctaaaaaaagaatggtattcagatataggttgggcaatgatttttttttttaacagatgaggaaactgaggcacaatgcaggcttcttgtcagaaataaaacccaggtctcatctctctcagcctctgtgctttataccagtttcaggcagaaggcagattagctgcccctgaatcactcttccatcctccctgagccaggccatcaacatagcattaaagaataaaatttgagaaagtcgtagggaaacaagattcatgttttatttccacagagaaactcaaaagtaggaagctcctccttcctggagaactgtcacagtgacttcaggtcaccaaagggaggaggtacagaaagatgctggtgtatgtgacgaggctggtggccactgaagcaccacagtgcagtgggaagaaacaaggagagacaagctgggtccccagcctaggaaacagaggtgtggcagccgggccagggctggcacaggctgggggccaaggggaggagctccctgacgaccagtgcttttcggggcctcggtggtggttgcaagaaattgcctagaagaaagaaaatcaaatggtagcacgtggccactcctaagcctgcggaaacggggcatcttttcacccagcgtctgggcacccaccattcttttgctgtcctacctgttcgcctgtggtgcccctcacttttgctccgcctaaaacagagtttgtggttctgccgagccaagctatcacctctcgcccatgcagcctcgctgcgtcccacctctgaacccttccaccaggaggctcttttctccacagttcccctgtaacatctctatcccggtccctgtgctccatctagaacaccatcttctcagagctgtgcctatgtggtcccaccctaaggtgctttccgagggtcctaggtcattttctttcttctttctctcttgcttgctttctttccctctttctctctctctctctttctctctttctttccagacagggtctccctctgttgcccagacttggagtgcaatggtgtgatcatagctcactgcagttttgaactcctgggctcaagcgatcttcctgcctctgccttccaagtagctagaactacaggcatgtgtcaccatgcctggctaaggtttttcatttgtttgtttgtttgttttgagacaaggtctcactgtgattgcccaggctggagtgcagcggtgcaatcgcagttcgcagcagcctcaacctcccaagctcaggtgattctcccacctcagcctccagagtagctgggattacaatcatgcaccacctcacctggctaattttttgtatttttagtagacggggttttgccatgtttcccaggctggaatggtttgttttgttttggtttgttttgttttgttcttttagagatggggtcttgctatattgcccagtctggtctcaaactcccagactcaagtgatcctcccaccccagcctcccaaagcacagagattacaggcatgagccactgcacccagccctagatcactttattatgggtctttctccacaccccaccatgaggtcccctcttccttatcacctttagagcacgcacccagagcatacctgacttcatgtcgctgcccactgagatctgaggatataccaagatcctggccctgccccgggtgactgtgcctccactgccaggatgtggcctgggtcggctcactctgacactcacctaccaaaacttcacccactgcagcaggccaggttgcacccgggaagcctgccagaaaaagagaaagtctgagtggccaccacagggtcccttccataccctctggcctcaggccccttctctctccagccagatgaagatcaggcccccatactcaccgaggaagaaggtgagactcccccctgcaaaaagatcaaaggaaagtgatgtggggtcatggcctccctgtactctgccatggcctccacgctcatgaagggcccagcagcaagggcaggctcacaccagggctatcaccaaggttttccagtctgactgtggacattcaggctgtggagttggtttcacagcacgtttatcatcctgagtgcacttgatccaagatgatattgaacatggttcctgggcacgtactgaccaagggggtcaaaagagcataggcctcgctttggcctgccaggtagggagacactgaccacagataacccggcagagtggaagccacagataactcagcagagtggaagccacaggcagtagaagctgcatgtccctcctctcaccagcctgtagtttctcgtccctcagtggaaggtcctctccccaagggcggggactttattgtcatgagagatggaaatacacagcctgctgttgctttgtcagccaaatttgtacttagcatattcatttactgatgttatgagattgccttctttgcaacggaataaaaccaaattctcacgtattttttcttttcatttcctttgtggaataaagcattcatttcaccgccaaccaggcatccacaggccggcctcccctaagtgctagtctgctttcctcgccctccattccatcttcccccgcaaaaaaaggtccacagagagggaacctgtgaggaagagctgcttgcgtgttttgcaggtgtcatgattttttaaagcctatattcttcttggagagggtgttggttctcagttttctctgttgctgctgctgctcctttttaaccttttctgactgggtgggtgtgaggcgcattgaaccctcctgccctccacttccaaactgtctcagggaacccgagtctcccttgcaaaggggtggggaggcctggactcaaagagagcgggatccggcctccggcaaccaaccgagaggaccccggcagtgaaagcctctctccccatccctcatgcagagcccccagcgggaagacagggtggttgccggtctcacctttgcaggggtcttgactgagtacttcccaccataggcagtgggatacgcatgctggttgtaattgtagttctgtggaagaagtgggcatggcggttagaacagacggacgaaggccattttgctctggaataaacatcccaccttcctgcctggaccagacctttcctaaaacacctgcctgctcccctccttgtgtcacgtgttttcttttatacaatctcctccagccagccagggcccccaccctcacctgcctttactgtcctagcccaaatggccgccgcctcctcctcctactcctcctcctgccctcaagacctctgccaactcttcaagtgttacttgggaggtgagggtaggagaccaagaaaagaagtgccaggacgtaacccagcgggtccatggtagatgtctcaccttggaagttacagctgccacctcctgccatcctgcacccggctgagaaagccattgaatggaggagtgaaagagaatttcagattgcccagacccgggagcaaggccaagggggaccaagggccctgcagggtaacttgaggacagagactcacctgatcgtctctgcctgcacgtttctgcagtgatgacgcgtccgcaccctgaaaggaagaaggggccacagttcgtgcctccgcagtcgtgcgggcattgccgggctttcagagccccagtttctccctcaccccacccctttccacgtgctacctatagagaaggcagtgagcctggaggagctgatggcccagatagatagaagacagatatccacactcagcattgggagccagggagagaaccaggtttggcaacaccttccccacccatgccgtgggagagttggcagccccagcctaagactgagctagaacaagtgagctgcagccatgcaggctcctctggggcagacgcaggcactgcagcccagcccaccttctgcctgcaccaagtcctgctgctatgcccgtaggcccttagtccctgcacaccgacgccatgccccacagggtgcttgaaggaggggttgttatctgcagaagctgcgtgcttaggttagctctggaccacaggaagcaaaagaagagaaatacaagaaaacagataaagcaacttaagacactgcagatgcaccggacaccccccccagccccagcgcaagaggagaaactctaagcgttgaaaagaagttcagttcctgccatcacggcttctccacttggaccgtccgccctgccacacacacacacagagtgacagtgaagtcctgactccagcattaattctgccttatccatacctgaccttgaacctaaaccccactgcaagccctaaccctgaggtcacaaactggttgaccatgggcctccagatattttttgcttggtctacttaaaaattaaattagttacagttagagatcagcatcctggttcttcgtgaaacatcagacaacacgccaccctgttcacacatgcatgcatgactgcacttagctggagcgcctcgacctccccctttgcagggccccacctgtccagcctcatatacttggcacacgtagacacgggagcaggcagcctttgtctcagtgcccacgggtcctgtttctcaaaggctactggccatgcagaattggagtgtggtctttggcaccgcccagaggttctccccatcctccctgacccaggtcttcagaccctcagcagctgcctccactagacagggacctgacccctgcacaccgccctcccgttccacctcagctgtcctccccatgccgcagcctaggccccttcttcccctcaatacgatctccccgcacctgtgcaccctgcggtacccacccagccgtggctcccctgggtccaggccaggcccagcaggagcaggagcagagcagaggcagtggccggcttcatgttcatgtgcttgtggaggccccagccctcggcctcggcttttatgctagggaggtcctcccaccctgctcctcagtgactcacggcttctccctctcaccccgcccccactcgggattgcacaaagcctgggaaagtgggaagggaggggaagaaactgggacagacacctgggtcagcggctcgcccagggccccgaaccctgtgtcccagagctgagaagtcctgccccccttacctcaataattgctttccagttgaggaaaggagtgttctgtttgaaatcctgcagggagaaggagggcagagtgggccggggaggcagaacccacggggtggtctatgcagcaaattggggggattccagatctcgggtaggaaggagcttttgggtgtggcttggggttggaggaaggtaagcacgtgggagattgagggtgtcagcacttgagatggtattggtgataagatttggtgataagatttggatgagctgtctcaaaaatgaagagggggagttggctgggcgcggtggctcacgcctgtaatcccagcattttgggaggccgaggcaggtggatcacgaggtcaggagattgagactatcctggctaacatggtataaaccctgtctctactaaaaatacaaaaaaaaaattagccgggcacggtggcaggcgcctgtagtcccagctactcgggaggctgaggcaggagaatggcgtgaacccaggaggcaggagtttgcagtgagccgagatagtgccactgtacttcagcctgggtgatagagcgagactctgtctcaaaaaaaaaaagggggggagttttgaaacaggtggttggagcagagggtggctgccttgagggaggcttggggagagtcaggagggccaggcccccagttcttcaaacagcaagaattctcctacctcccagagtcggctgaagtagaggagggctcgggtgctggggggcgggacctggttctgtggatgaaaggcggggagcaggttagcagagagcctgggcccactcacccacccctcctcctgctactgccctatctcaaccttcagaatgtcattgtgactaaggttggggatgggaggagctgagagtctttagggacaccaggaaaccattttgggaaacacagggagagagagaggcactaaccaactctccctgtcccagagcatacaatgttttctatcccaagttccccagcctccagcagaacctaattctagcaaaacctcaagactaggacctgcctcagagtgtcccctttccacctgccgggcctcctccagcccgtttcccgaagctgtggggctgcagccaccccttccacaccaccctggataacagcggagacgtaagaaaggagcagaggccaggagtgtggggcagctaaggtttatttcaagggcaagggctgagattagtgatgagagggtggtgttttaaggagggagtgtgggggctcccatccaatctggtggctccttgtctggaggtcacgggatgcgagagcttctctggtcctgggcaaagaaacaggtttttttttgtttttttttttttttttttgagatggagtctcgctctgtcgcccaggctggagtgcagtggcacgatatcagctcaccgcaacctccgcttcccaggttcaagcgattctcctgcctcagcctcccaagtagctgggactacaggcgcacaccaccacgcctggctaatttttgtatttttagtagagatggggtttcaccacattggccaggctggtttcagactcctgacctcaagtgatctgccagcctcggcctcccaaagtgctaggattacaggcatgagccaccgcgcctggccagaaataggttctaagagagagcttgagaaataggaattccagggcattgtgagccagcacaagggtataagagacccctgctccagaaacctacagggacctttttgcccaccactgctatccaaacaaacccagatatcctggcttgggcttaagaaccccctgcatcgtcaggaacattacactgcgttcccctctgctccctcctcactctggctgaagtcctcagctccctcaccccactgtgaagaatggggctccattctctcccctgcccacctctgccctgccctgctttctaggagatctgccccttgaggagctggcccagatggatcctgcctcactgcgatcactccctcgactgccgccctagatgggcaaaactggcagggtgtctatcctggctctctgggaagtgtctgtatgtgccccggctctcccatcagaccctaagttccctgtgacccaggaaagagtcttgctcctaccagaaaccgttctctgtgaaacagagaggccagatgcagtgactcatgcctgtaatcccaacattttgggaagccaaggtgggcagatcactggaggtcaggagttcgagaccagcctggccaacatagtgaaagcccatctctactaaaaatacaaacattacccgggtgtggtggcgggcacctgtaaactcagctactggagcggctgaggcaggagaatcattttgaacccaggaggcagaggctgcattgagctgagatcgaaccactacactccaacctgggtgacagagcgagactccgtctcaccaaaaaaaaaaaaaacaaaagaaagaaagaaagaaaaagaaaaaagaaaagaaacagagaacatgaatccactgtagctgggtgggaacatctgtactctcctgtctcctcaatctccttcctaaaaggtcagacttagattttcctgagcccagtcttctctcttttacattaaaggccagaaactccactgctcacaggggccagtcaggtggctaaaatgactgtgacaggtagggacagtctggccactagggagtgacccccccacccattcccaacaccccccacctgggccaagcagcagctgtttctcagctctagcctaaccccaccccatggaaatggaacccagtgttaccaaagtttttgaaagaaaccagaaatccaaatcattatgtgaagtctctccatgtttaaactttgacaattaattcatattcttaaaaaaaaaaaaaaatagagtgtctcaaaaacccatcctccaatcacgaatcgcagcttctgccgggggtgtgtctgcatgggttgtccacctgtccttcctcccctcccttccactccagccccctctactctagaggtgcctgtgctactcaggtatcaaagcagcctggccaggggttcccctgcaagacggaagggtaggcagggaggaaggagggaggggttctgcgccccagctgtgtttttgtttgtgcgggagagactaatgcctgtcacccctgaggctctcggccagtgctggttcctttctctgggtgcccttcctcttggggcctcttagctccacctcactcctcattccatgtgccctctaggagtcaatctactctccccttaaccttccccatctcaaaggggaaagtgaggttcaggacctgctcgggtctatatgctgaaacagcaaagaagcccgtcccctctgctcaacctcaatctcagctgctccagattctccccctcttttcaggtctcctctgtcctccctcctccacccccagtgtgtttagtttttgtttttagcactggcctaaatgcttcctcagtggccagcatcactgtttccccagctcacagagcggaggtttagctttcttccctatagccctctccgacgaagatgtccagcccttaccttgtttatggcatcccagttgatgaaacccagcttggatttaaaattctatggaggaaacaaaaagaagaatggccaaattgagtcataaggtaattggccgagagaggtcaagggccactgctgactgttggtttagaaagaggaccccagactgtggggccaagggcaggggttggttttccaaatgcgagtgaacagagccatctcgcagaactcaccttccagaaagtgtcaaagttaaacatcccaggagacgtctcagagttctatggaaccaaggagatatgggatgagagaagaacccactttgtgagccagagtcgggagatctgagtggcaggaggggaggcgaggattgtgtgacaccatggtcccagcccaaggtggagtgttgcctccactcaccacagtattgactccaccaacagcgtcacctcctccactgccccagctcgacccttgcccctgggtggggaaaagggggaccgatgtccaaggcttatgcttcctatcatgcctgccacctgtcaacctgccccggattgcttcatccccacctcggtccaggcttcctgtcctcctctctataaagctgccttctcttccttacacagcaccaaaaagttcacttgggaaagctttcttagaatggattgctcccatggaaccccacccagtcccctgaatctcaatattcagactcttgcctccatcctggtctgtccccaaaacacctcaagcaaatgagattagctaacgtgtagtcccacggcacgccaagcaccatgccttatgcagcatctgtctccagagtctggactccacaacaccttggtctggtggtgacatggaaagctgtacagtaactgaaggctgcgtgagtcaggtttcactgtcctcattttactggaggaagctcaggctcggagaggttagctgacttgcctgaagatatacagatgacatgatagagctggtggtgattttaatatatatcttaaatttttttgaggctgggcatcgtgggtcacgcctgtaatcccagcactttgagaggccgaggtgggtggatcacctgaggtcaggagtttgaaaacagcctggccaacatagtgaaaccccatctctactaaaaatacaaaattagtcaggcatggtggcacatgcctgtaatcccagctacttgggaggctgaggcatgtaatcctagctacctgggattacaggtgtgagccactgcacatggcctattattttctttttaaaaagtagagacagggtcttcctacgttgctcaggctggtctcaaacttctgggctcaaatgatccccacacctcagcctcccaaagtgctgggattacagttatgctggtgcctggccagagctggctttcgaaacctcatcttctacctcaaagctcagtgactttctccttctcaacactgcctccctaagtatggaaatccccttgaccattcttctgttacttttatctgttttctccccttacaaaagtaacatggctccgatccaaatcaaaaggaaggaaggaatgaatgaaccaaagatggagatggggatcccagaaccctgttttggtctcttgatggtcactggacgcagattcagagcagcttgcaagaagaaactgatatttttgtttcttttcccaggatcttagcatgcttcaccatcccttctcctaaagccaaccctgcctgcccctaggctcaccctataattgtctccagagcctccaaggaggcgattgccctctttgcttatttcctagggagacagaaaacggagaggagttgatggggaggcaggcgggcagggggacgagagggcaaggaagcagggtgtcggcgagggattcctgaatcgggggactgagacatgagcatgacagaggacttcccagaggcctgagaaagaggtccttctctcggggaagttccatctgccctgagatctcgtttcaagctcctgtgggtcgggtggctgctcacttacgatgtccatagataacatcgccatctctgtttatgttcatttctgcaagccgcccaaaatccatcagggagggctttgccagcaaagcatccgaattctcccctggctttggagctggagtgggccaggctgttacactaaattgattcaaactgaaggaccctgtctgggctgattggcattagtaaaaaaaggagatgctagctggagagccagtgggggctgaggcggcatagagtagactggctggtcccctcttaagggagaggtgggctcctctggagtcctgctttatctgctgtgaaacatggccagacccatcagtacttcctcgttcccagagctctcaggtagacctggcagggatgtgggaccacctgtctgccagtattgctcctggagaacagacctctaccccacttactaccggcacagtctctgaccccacatctaccatcctcttaccctcatgttgctggaaactccctgtcctctgaagccctgcagggtgagacaaagaaacacagacccctgctgaagatcctgaggccacccccgaaaattaatgtattgatttaatatgattcctctaagaatcctaatggcactctcttttggaactggtccaaacactgacatttttttaggagaatgaaagtttaagaataggtaagaaaacactggaaaagataaatggtaagtgaagataagaggtagatagtaacatactctaaagctaccataaataaagcagtcctgtccgacagaattcccagaaactccccaaaatactaaggtatttacaagaggcattttaaatcagtggttgaagtgattgaatacatgggaatgggaatatcagtgaagtattttgggggaaaattttagttctagctcatcaatttcctcctctctgtttttaaccagttttcccctcataaaggaggacacagctcggatacaaagcgtagggtaagtctggttagatggaggggtgggactagacagcatataggaaaacaaagtccagatgcatcccagttaaactgaaaaagtgaaattgcaggagtatgcatagtgctagaagaaaattaccttaaagcggtacaccaagagcaaaaaccatagaggaaaagatggctgctttttgactacttatatacttaaaactgaggtatattaaaaaactagaaaagtccgagtgcagtagctcatgcctgtaatcccagcactttgagaggcagaggcggacagatcacctgagatcaggagtttgagaccagcctggccaacatggtgaaaccccatctctactaaaaatacaaaaaaaaattagccagaggtggtggctggcgtctgtaatcccagctactcgggaggctgaggtaagagaatcgcttgaacccaggaggtggagtttccagtgagctcagatcgcaccactgccctccagcctgggtaacagagcgggactccatctcaaaaaggaaaaaaacacaaactagaaagagggttacaaatgggaagaaatttttttttaaaaaaaccagtttgttcccataaaaggttagtatccctcatagattatctaaaaagagatgtctctactcagccccagcacctccggtctggccttgcccctggccacgtgggtcctttcccaccaacgcctcacccaggagcttgttagcaacgcggctaacaggctcagccccacccagccctgttagagcaacctgcactttcacaagatctccgtgacactaactctcagcaccacaggtgctgacataaagcccacatttccagcataactggggggaatgtttttccaaagcactctgaatcccccagagttcaccacagtctgttccccggctggatagaggacatttaagacaattgtgcttctaaaaggaccggtttacatggaatttctcccagccccatctgtggtataaggtgaggtatatcacagcaagatttgcaattaattagtactttggaaatcgttagcatttttaggagtgcatttggtttcttctgccgaaatagtcagttccctgcagacaaggcaggagggggttgagcagagttgagttaggaggagtgggcacagtcctgggcaggaactgcagtccccaggagacttaagagactttggctctcacctgaatcccagattccccgctcccgcgggcttcattccctggcttttcacactgccggggagagaaaggggagactttccctcagtcccctcccagaccagtcccagccccaaaatggcagcattttaaccctggggcgagccgcttccgctccacctccgcggccatccagccccatctccgcggagccttggctccccgatcctgcgagtgaaaccagctgctctccttttccttcccgcggttggtgggagattcacgccagccactcaccccgggtttatgtccatttcctccgccgctcccaccgtggttgccggaggaggagccggtgctggatccctgcaggggaaagcaagatttcaaacgctgtcctaaaggacctaaaggggacccagtcgttcccagcggtgttacagatttgttggaaccccaatcagattccagtcctctttccaacctccagaccttccccctctttagcctgttggtcgctgcaggaagttattccgagcatggagaaggccaggtgtggccgagggtattcggaactacgcaatgatttggagaacctgagctgctgcccaccgcaggccgggggtgggaacccctggagcccggccgcgcagtagccgcgatcctgccaccagggggcagcaagtggaagggaccctagagccctcacctgggagcggccgtagctgccttggtcaccattcccagaactgccctagatgggggagaggaggatcatacggggagcggcgcatgagagcagctcaggttattcggcttattgtgtccacgcacctcctcctgtctgacacttttcccgacccccgaggaagccagatgtggctccctctccagctcgactccaagacacgggatgggagaggccgtcagccaaggggttggacaggccattgaccaggaggctggagagactgccggctctggagtcagtgaggcccggggccctggggtggcagctgcggggtcacagcgccccttcctgccctcacacccatcgtgcaggggccccatgtgtgaatgtcgtctgcaccgtcgctctgtcagcgtccgtaggtctcccggatcacagtcctgcccccattctcctgggagcttcccagacaagtgtcatattctcccatgtccccctctttctccgccaccccacggtctcctgagacttgccaagtggacttgactgcaagagcttagacaggcgggataacgtccccaccatcacagagtggaaaatagggatacagagtcagaagcagtggggtggctctggcagaaacgatagtgcgcgcatcaggggcacagcatgggtggggaacaggaggctgagggagcctcagggtgacgactatcagcgaggccgcccatcctcgggcagcggcagctttcagagaaacttggagccctctcccggcagggaccactagggcctcaccccatctcagccttccacagaggtgccaaactcacccaggaggactcactgccgctgtcacctctgctgccaccactgttgccactgctgccaccactgctgccgccactgctgccgccactgctgctgccactgctgctgccaccactgctgctgccattgttgttgtcaccattgctgccactgccactgctgcccgactgtgagccgctgcctccctgaggggcaggaagggagcagggctgggattaaagacagagcaccaagacgggcccctcctccctccctctccacccaggccatattccatgatgcccagtctaaggggagcagaacttctccatttcctcctggtgcacaactcctgggttgcccctctccactcaccccagagttgctggagcctccacctgagccagatggtgggggattcgtgcactgtcgagggaaagggatggtgagtttggggacggtgagtttggagacgttggcctcggccatggacacaggccaggcctctcccattctttggggcttggcttcctttctcctaatgtgtttctcccacctccccttcccatctgcctcctccccaggcccaggcccgtctcttcctccttttttttttttttttttttttgagacagggtctcactctgttgctcaggctggagtgcagtgatgcgatctcggctcactgcaacctccatctcccaggttcaagtgattctcctgcctccgcctcccaagtggctgcaattacaggcgcatgccactatgaccggctgatttttgtatttttagtgaagacagggtttcaccatgttgaccaggctggtcttgaactcctgacctcaggtgatccacgtgccttggcctcccaaagtgctgggattacaggtgtgagccacctcgcccagccccatctcttcctctcaccccaatccctccactcccccatcttgctttcctctttgtctttccccagctctctgtagcctgcacccagtggcttcttcatttgttcccagccccttcctcttaccccttcattctggttgctggctctcactgaaccatagccaggctgggccacagctccctgcagagagggtgagactgagagtaggatccagagggaccagggaggcacgcggagcatgtgggcttggagggagggaggtggcaggtagcaggtctgggggtgactttacctgagtgttggtcccaaagtttggtggccctccattgcctccttgaccccagggagctccctgaggattcattccaaagctgcctgctgagtttccggggtatccgtggacccacggagtccccagacctccaggattgccctggccctggcctccaaggccaccttgagagccaaagatgccatggcctccagaagtttcctgcaagaacaacatacctgcacttagtgggaccatctctgaccctggtagagaagagccagggcaaatcataaagagaccaggagagagacaggcagagggactccagggtggcataggaggggggcagaacatagaaggaagctgccccagaagcctgcaagtaagagatccatccatcctttcaaccgtttcccaagaatctcagcccagcagcccacagcctcccatttccacatgcagccccacagccactcacccaagcaccattgtggccaggcaccccctgccaggagccgcggacagcatctgctccgtgtcgaatgacatcttctgcctgtctgccaatctcgtgcccagtgtttcccagagcatgggctgcttccccgaccctgttgcccaaagcatctgctacgccaaagcctggaacctgcctgactccagtgccaactgcttctctggtcccttggccaagggcctcactgactttagagccagctgcccctccggcctctttgccaatggcctttcccaccccttcgctcagggcgtctcccaggccatgtccaagggcctccccaatatttgtcccagtgctttcctctccgctctgcagggggccagcctccccactgcccaggcagagggccagcaggaggcaggccaggggcccctggaacttcatctctgcccagccccctctctctccagagtgtcttcctcccaccagggtctcctccttgccgcccttgctctgcgtctctgtgccctcctctgtcctcctccttccgactccctgtcctccctccctctgggtctgcagccttctctctcctgtcctcaactgcctgggcttctcagagtccacctccctgtcactactccttatactctaggttgggagaaggtgacagggctgggcaacctgaggtccctccccgcagtgactcagggcccagccaccaatagggtaatcagctgttattgtgagtctgagagtctctgtcgaaacagagagtgagccgcatcagggagggagggagaaatggatgaggtgatgcaaaagtgctcccatttcccaaccccaggcattcggggagctgggtgggggcaggggcatctaaggagacaggttgtcgttggctcctggaggcggtggggtgggggcagacttagaagagaggagttactggcaggaccccaccaaaggagtaaggacagggaagccccaggggacaggacccacccaggctcagccagcctggctcaggggctccagagtgacaggcattgcccgtcctcggcctggcctttctcggtttcagcacctcagcctctcctctccctctcccctcccgcattgccacctacaggtgactgccttcttgttcctccacaccttccagcccacagagagagactggcaaacacggggctgcgtgtcagtttctgagattctggggagagcccccggggggaccctcggtgtcggggaaggaggtggccatagccctttgagtggtcagcagggtgtctcagcgttcaggctgctcccggctgagaaagctgggcgcggagcagggcagccaggcgcgccagccacccccagggaacgagtgggagggaaggccaagggagggagccgctgacccaggcacccatcctgtttacgcagccctagaggggcacgtgtgagtataagcgcctatgaggggcgggactgggccagctcaccccacccatcccccaggccaggggccagggcagcaatggcaagcgagaagagggtagcgcaaggtcaggagccatccgtgagagccacggccctctccccagtcccagctcgggatacagaacctgggagcctccccccgcctcacccctgcccagcaagtgtggctgcttctctattcccaggggccacagggcctcccactgtttcgtatcactggggttcatcgcccagttaggaggggccagtttccatcagcctttctcaatgtctctcagtcagtctctctcttctctccaccccaatatccgcaccccagcttataacatccaacacttcttaccttgtaaacactatccccatctgtcctcctcagctcctacttccctgttattccatctctgactcgttaatgatgataatagcgatggtggtaataataataataataataataataattacagctccagcttatcagcggttctgtatgtacccagcattggactaagcacaagcagtttaagaattatacaactctgggagatggttctttttttctagagacagggtcttgcccaggctggagtacactggcacaattgtagctcactgcagcatcgacctcctgggctcaagcgatcctcctgtctcagtctcccaagtagctgggactatagatgcacaccagcacacccagctaattttttttttctttttgagacagagtcttactctgttgcccaggctgaagtgcaatggcacgatcttggctcactgcaacctccgcctcccaggttcaagtgattatcctgcctcagcctcccaagtagctgggattacaggcgcatgctgggcctgtaatcccacgctgggctaatttttgtgtttttagtagagacagggtttcacca[139 bp omitted]ttgttgtgttgcccaggctgatctcaaacccctgggctcatacgatcctcctgccttagcctcccaaagtgctgggatgacaggcatgagcaaacagtggtattacattatgcttgctgcagctcctgcactctctttgttttttgtttgtttgtttgttttgtttcgagatggagtctccctctgttgcccaggctggagtgcaatggcgcaatctcggctcactgcaacctccacctccagagttcaagcaattctccttcctcagcctcccaaatagctgggattgcagatgcacaccaccatgcccagttaatttttgtatttttagtagagacggagtttgaccatgttggacaagctggtctcgaactcctgacctcaagtgatctgcctgccttggcctcccaaagcgctgggattacaggcatgagccaccacgcccggccatgtgccctttttgttaagaaggaagattagcaagtatgaaagaggtgttctgactcaccagcacagctggacatggggtctttctcaaaggtaggtccaggcctcaagaaaataacactaataataaattttttcaaaaactaaaatgaagtctttctctttaacatagtcagagagcttaaaagaaaattgagaagaaagtaagtttctccctgtgtgattcagttattcaaagccgtgtccatggatcacctcaattctcccatgccaccaacaggcctgtgttctacctgctaggaaaaaattgcccctcagacatcgctgggcctgaggagccacctcagatcagccctagggcatccttattaaataactagtgtgaaccaaataaaatattaggtgctttcacatacatgatctcattgaatcctcaatatgaccacaagaggttaatattattcccattatacagatgaggtaactgaggcccaagtggctcagcatcacacacaaaatcatatgtgaaaagactgtggtaaaatagagttgtcaaaacttgagccaggcactttgggaggctaaggcaggtggatcatctgaggtcaggagttcaagaccagtctggccaacatggtgaaaaccccctctctactaaaaatacaaaaattagccgaacgtggtgacaggcacctataatcccagctactcaggaggctgaagcaggaaaattgtttgaacctggaaagtggaggttgcagtgagccgagattgcaccattgcactccagcctggacaacagagcgaaactccgtctcaaaacaacaacaacaacaaaaaaaaacttgagccaggtcagtctgactccaaacagctttctctcctccatcaccatgccacccatgttcttatgcgtgatggcacccacaaatctgatatgcctatgtcatgtccaaggccctctggtctcagctcttctctctaattcacatcattcattcagcaaatatttatgactacctgctccgtgacacgcctattccagacactggggatacagcctagaaaccattctccagctgagtgacacctcataatcccagctcatgcctgcaagcccagcactttgggaggccgaggcaagtggatcacttgaggtcaaaagttcgagaccagcctgggcaacacagagagaccccaactataaaaaatgtttttgaaaaagtagttggatgtggtggtgcacacctgtagttctagctactccagaggctgaggtgagaggatcgcttgagctctggaggttgaggctgctatgaccacaccactgcactccagtctgggtgacagagtgagaccttgtctcaaaaaaagcattctccttgcagaacttacattcatggtgggggaagttaggcaataggtgacagagaggtgttttaaatagggtactcgggaaaggctctttgagatgtggcctgtgagctgacccctgcagggagtggaagagtgagccatggggattagctggggctagtggattccaagcagggggaacagccatgcaaaggcctggaggcaggagcctgcctactgtatttgagaaccattgtggctggagcagtgttgggatgggagaagctaaagtcaaagagggaaagatcctggggtcttgcggactattatgaagactggcttttttttttttttttttttttgagactgggtcttgctctgtcgctcaggctgaaggtcaatggcgcaatctcggctcaccacaacctccgcctccagcgtacaagtgattctcctgccttagcctcccgagtagctgggattataggcgcctgccaccacgcctggctaatttttgtatttttagtagaaacggggtttcaccatgttgtctaggctggtctggaactcctgacctcaagtgatccacccgcctaggcctcccaaagtgctgggattacaggcgtcagccaccacacctggccaactttgacttttatttttactctgaatgaggtagaaccagccaagggttctgggctgccacgggtgctaacagagttcccctagggaactgattgttgggggttgtggagtagagagaccagggaggagggagattggaggctggactcagtctagtgggaagatgaggctttgggggtgggtgatgtctctgctcccttctggggggtcccagatctcaaactggcacctacagtcttacctcttccacggtgcctatcccagagcctacattcaaaccctagctccaccgcttactaaccatgatcttaacccatctgtgcaacagttttctcatctgtaaagaggggtgaatgtgaggattaagtgaagtaatacatgtaaattgcttagagaagtgtctgccactcagaagcactcaatatatgttctcggcagtgctggtcacattgctgtggctggaatgctttcttggcagttgtttaatcttgtgacacacacatgcacacatcctgaaaatgccagatgcatggctcatgcctgtaatcccaaaaccgtgggaggccaaggagggaagattgcttgagcccaagagttcccgaccaagctgggcaacatcgtgagaccctgtctctacaaaaaatacaaaaattgccagggtgtagtgacgtgtgcccatagtcccagccacttgggaagctgaggcacacggatcacttgaatccaggaggctgaggttgcagtgagccatgattacgccactgcactccagcctggacaacagggtgagaccctgcctcaattaaaaaaaaaatgccagatgcagaaacttacttttaaagaacactcatttggagccaggagagggtagctctcacctgtaatcccagcactttgggaggccaaggcaggcagatcacctaaagtcaggagttcgagaccagcctggccaacatggtgaaacctcatggctactaaaaatacaaaaattagccaggcgtggtgtgcgcctgtaatcccagctacttaggaggctgaggcaggagaatctcctgaacccggggttcggaggttgcagtgagccaagatcgcaccactgcactccagcctgggcaacagaacaagactctgtcaaaaaaaaaaaaaaaaaaacccactcatttggatgtagccccctcccgcttcctgggggtcgcaagggcagcatgccacctcactgctagagatgttcagcagggaagtgcccttgaactggagcctggccatcaccactgactagcagggtggcctcaggcaacacgctccgttccgtgcacctcttcttcaacatctgtgagggcaatgatcatggtacttgcctcccggatggttgtggggatgaaatgaatcatgcctgtaagtgcttagcacagaccctgtaaaagatgcccggtgagagccacacccaaactcctctccctgttcttcaacatcctcagaaaccggcccttcctctctgtgtttctccctagcctggctccacccatctcaggcaaagcagcctgtgtcttgctcacactcgttccatggcccttcccaacctgctcaagtcagtggcttcccttctgctccttgccagacattcatgcctggccttgacatcactgcttgaacctctttgtctggggggaaatggatacgatatttgtaatatgattacagattgtcataaccaacaagaaaaacaagatcagcgctatgagagagagtgacagggtggccgtagctcaggttgagcggtcaaggtagctgagatgcaaagggtagggaagagccagtatgaggggccgaggggcatggagagtgttcctagtagagggaacagcacagaagacctccaggcaggagagagccaggcgtcttttaccctcaaaaccgactcaaagctctcctttttcagaagcttcccaggactgactcagtgcctatcaattatcttgtatctctttggtattttcaggacccccatccaagcaaacccagcaagaaaatgtgcctaaaaaatagtcagtcagccgggtgatggccaggcgcggtggctcacgcctgtaatcccaatactttgggaggccaaggcgggcgaatcaactgaagtcaggagttcaagaccagcctgaccaacatggtgaaaccccgtctctactgaaaatacaaaaattagctgggtgtggtggcgcgcacctgtaagggaggctgaggcaggagaattgcttgagcctgggaagcagaggttgcagtgagccgatatcaccccactgcaatccagcctggatgaaaaagcaagactctgtctcaatatatatatatacatacacatatatacatatatatacacgtatatatatacacacacatatatgtatatttttttaaataaaaataaagtcaatgaaagcttttacttcaagaaagaaagagtcccttgaatgttgccttttcgaaagccgccactataggattcttttaagtagggcctcccccaatacctgtgagatgatgtccagcacggagcagaccctcaatcagtatctgacatgaatggaaggttctatttatatcagtgcagcaagcagctgggtgctgtggctcacacctgtattcctagcactttgggagcctgaggcaggaggattgcttgagctcaggatttcaagaccagcctgggcaacattatgagaccctcgtctctacaaaaaaaaattacaaaattagccaggcatggtggtgtgtgcttgtagtcccagctacttgggaggctgaggtgggaggattgcttgagcccaggagattgaggctgcagttagccatgactgtgccactgcactccagcctgaacgatagaccaagactctgtctcaaaaaataaataagacaaaatgcagcaaatataatgtttacagtttactttgaaatacatcaaaaatgtttgatatggggctaaatggacagatgtgtgaccaagcaagtatggtaaaatctaagtggtgagaattctggtgttcactataaaattctttcatcttttcatgatgcttgaaatgttttcaaaataaaatatcgcagggggagggaaggagcatatgtaatgaaatgatggtattccacaaaataagggaaaatgcagtgactataaagtgaggaacgtcccattttttgcacaaatgcaggcccctccccttgccggtcattgagctcttattgatgcgtggctttgtgtgtttgcattcacattctgtttataggccttgcctcccaggaaggctgtgaattccccaagggcaagaacactgtctattattttcagtcccccattgatggaattttgtagctggaagcaacagttgtcgaatccctgcctccctttatacaggaggaaatcgtggcccctagaggggaagtaggcggccttcaggcatcttgctcccgattggaacgcaagtctcccagcacccaggctagtgcctgggagtgttacagagacttcaccgggaaccacgagaagtcaggtgctggcgacagacggagccagacccaggcctgctgctttctctgtgggcgcccttgtcccactgagccgcagcatcctcatccatacaacggtgacgataacagggcttctgcctttgggttgtgggagacttaaagagttaaagaacatgaacaggccagatgaagtggctcatgcctgtaatcccaccactttgggaggccgaggcaggagaatcccttgagcccaggagtttgagaacagcgtgggcaatatagtgaggccctgtctctaccaaaaaaagaaaaaaaaaatttttttttgagacagggtctcaccctgtcacccaggctggagtgcagaggtgcaatctcggctcactgtaacctccacttcccaggttcaagtgattctcctgcctcaacctcctgagcagctgggattacaggcacgcgccaccacacccagctaatttcttttttggtatttttagtagagacagggtttcaccatgttggtcaggctagtctcgaactcctgacctcatgatctgccagcctcggcctcccaaagtactgggattacaggcatgagccactgtgcccggccaaaaaaataatttttaattagccaagtgtggtggtgtgtgcctgtagttccagctactcaagaggctgaggtgggagaatcccttgagcccaggagtttgagaacagcctgggcaatatagtgagaccccatctcttaaaaaaaaaaaagaaagaaaaagaaaatttgatgagccaagtgtggtggcgcgtacctgtagtaattccagctactcaagaggctgaggtgggaggatttcttgagcccaggaggtcgaggcagcagtgagccatgatcgcatctctgcactctggcctgggcgaaagagcaagattctgtctcaaaaaaaaaaaaaaaaaaaaaaaaaaaaagaatatgaacaactctggacacggtaccttgagtctagcaagtgctctatgctcagtaattgtaatcattgttcctctgggctttgaatggtccacagatctgaaaatggggccttctgtgcccctactcaggtggctcctgtcaccagcatgtcttccacctgagccttccatccttctccctctttcccctgagaggatccccagccccatcccgtgtctcacttttcttattcaccaattctccttctctgctgacgccaaagggcaaagacctctgtttttccagaatatcctttgtagctcttcactgtttctctccttccacttactgactgtgtaaacttggtcatgtttcttaatgtgtgcaagcgcccacgtgcttctctataaaatggggcaataacagtccctttcacctaactggggggttgggaggagtcaatgatgtcatgcaggtaacgcacctggcaggcagcctggcaggtcttaactgcacaataaatacaagttattgttgttattattttggcgccccccacccccttgactgaggatgctacctcctgggcccagaccattctctcccggtgtgtctgtccccacgagtggcctgcagtggttttccctgcacgagtcctcctgccagtagccagcacgaactttgcaccccagcaaagcgtggtttgtccccattacccgccctcttacagctaatcagcctgaaatctccagctcaacccaccctatgcctcagacactccgactccttcagcaaagtaacaagaaaagacaaggccctcctgcctccctgtccatccctccttagggagcccaggggaccacaatgagacagcatagtgtatcaagtttattcacaaatcccagtacaacccccttcagggatttcagaaacctgtcccccacccccaacccctccaggtcatgtcagctgatgtgacaacggcgacattattctcccagcaaggccggatgccagtttagggcatgatgttggcgacgctctggaagagagaaggagagcaggggtgaatgtagggtccacagtcatgacgggacccgagacctcagccccgcccctcgggagaagcacaaggggactggctgctctggccccggagttatgttctggggaagtttcaggaaggtagcatctaaacttaagaacacaaggaagccagtccccacaggcagaggggctggggcctctgcaggaaccaacaagcctcgtgtgtttagcctgagaggatgctctgccgcccccatagcctgggatacacaagggtgggccttcctcctccgtgatacaccctcaccctggcctgcaccaggt[133 bp omitted]tggtgaaacccctgtctctactaaaaatacaaaaattagctgggcatgttggcgcacacctgtaatcccagccactcaggagactgagataggagaatcacttgaacccagaagacggaggttgcagcgagctgagattgcaccactgcactccagcctgggagatagagtgagactccgtctcaataaattaaaataaagaaagagagtcaggagtttactttgagccccaactgggaaccaggattccataggagcctctgcactggggtgaccttgcaccagggagaggacaaagacacaggctccccctcccagcatgaagcaaaggcatttgcaggagggttgggacaggagggaagccagtcagcaaatgggaatcgaggaatgacaaggagagagagggaatgagaacagtcagcagcccctcctccctccctggctcccaggggcaccagggcctgggaggtcttttctgccagcttgtgtttgccttggtggaaatgaaaggcacccaaaagatgagggcagggtgcaaaggggagggagcaggtggagagagggaagcccaggactgggtatcaggttggagggtctttgcagaggctgcaggtctgcccgcccggggagctgtccaaacagacaccgggaaggggtcggggtgagcgtatctatcaggacgcagagcagaaaagagacaccatggggcactcaccctccacagggcgggaaggttgatgaaaggcgtgttgaccgaggcctgcaattcaaggacaagaaggtcagtctccagcgtctgacccacagccatgctagggaactcccaggggcctcctctcccctaccccagagtccgcgcttaccccagaggctaacggcgtggttgtggcccctccttgatggctggaagatccgctttgatggttgccctgtggacaaagcccagactcttgttacaaccccacaaacgcggagggtctcccagttccttttccccagggacctggtcccctccagggtgactggggctgcggtgggaggcacagcttaacccactgcctcctcactgtccagaagaaaacccaaagcccgtgctcgcgtgggcattctgcctcctgctgccttttcctccccaaagccccttttaatttccttaatgaagtgctctcagtcatggaggaggggctggtggaaagggaaggtagaggacccgtgacaaacaatatcaggacctagtttaacctcagccctgacctcaaatctacccttctatgccctgtctagctgcatccctaactccactgatccttgtccttaacccagccccagacactcagccatgcaccccagcagtgcccccaaccccggctgctgttgccagccccaaatcctacagtgcaccgtcctctgctcgcggcaccctgcagcctgccgtgcccgctcctctgctgcgccgttcctccccacccacccatccctggctctgtctggcggcagatgtggctctggacttcgacgtctgagccagtcacatcttgcagatccaggacccctcatggagcctggagagtgagggcgcacaggagtccaccctctcctgctccccacgctcccttcttggtgcctgttctgttgtgagtggtgctatttgcctgcctccagtctctgttccctctacatattttattttattattattttttttgagacagagtctcactctgttgcccaggctggagtgcaatggtgcaatctcagctcactgcaaactccgcttctcgggttcaagggattctcctgcctcagccttctgagtagttgggattagaggcgccagccaccacacctggctaatttttgtatttttagtagagatagggtttcaccatgttggccaggctgctcttgaactcctgagctcaagtgatccacctgcctcggcctcccaaagtgctggggttaacaggcatgagccactgaacctggcctctgttccccctacataaatgggtaagagaaaccttccagaaaacctctcctggctgggcagtgcaggggaagagaaccctggcctgccctctgccaaagctgggcactagccacaggactttggcacgtcccctaacctctctgagcctttgtttccttatctgagaatcagggcgtcagcagcctcatcttgaccacatcagagggtagttacaaagattacacaggccaaggctcatctccgaaagctattcctcatgctcactctcctaaccaggttttgtcaacactcagtccctttgcactatactagatcttgatctcaggaactgtttcccattccccaggaagggcttcatgggccccacttgaggcccccttaaccaggagggcagctccctgaaggtgggacagggtgcccgccaccctgtctgatacgtgctttgcagataaggtggctcaccccatctgaccagctgccaccagctcctttgtaagggagatggggaagggggaggaacccagtgatatagctgcccaagcttctttcaccaaacaaaggctacgcggacccccccgccccgccaaatgtcccaggggtttaacctttccctcccccaacccccctgtcccccatctccccatccctgttcacctacattcagcagctggttggcctccttgctggcttggttgaccccattatgagcattctgcagctccttcccggcctggccagcagcatggtgggcaccttggccaagcttctccacttcctttccagcctggtcagcagcatggttgaccccttggccaagtttctctgcttccttcccagcctggtggaccccagtgtggaacccttggaccgctttgtctgcttccttcccggcctgttcaagggtatggtgaactccctggccaaactgccctgcctccttcccggcctcgtggaccccaggttggacaccatgaactgctatgtctccctctttcccagcctgccctgctgtgtggtgaatgtcgtggccaaactgccccgcctcccttccagcctgactaacgccatgatggaggccttggaccactctgtcttcctccttccccacctgcgaggcagcatggtggacaccctggccaaacttctctgcttccttccaggcctcattaaccccatggtggaccccatggccgagcttctctgtttccttcccaaactgactggcagcatggtggaccccctggccaaacttctctgtctccttccagccctcactgagaccatggtggaccccctggccaaacctcccagcctcatttccggcctgccccgcagcatggtgggccccctggccaaatctccctgcctcatttccggcctgccccgcagcatggtgggccccctggccaaacttctctgcctccttcccaacctgaccagcagtatggtggaccccctggccaaacttctctgtctccttccagccctcactgagaccatggtggaccccctggccaaatctccctgcctcatttccggcctgccccgcagcatggtgggccccctggccaaacttctctgcctccttcccaacctgaccggcagcatggtggatcccctggccaaacttctctgtctccttccagccctcactgagaccatggtgggccccctggccaaatctcccagcctcatttccggcctgccctgcagcatggtggactccctggccaaacctcccagcctcatttccggcctgccctgcagcatggtggactccctggccaaacctcccagcctcatttccagcctgccctgcagcattgtcgactccctggccaaacttccctgcctcacttcccgcctggttggccccgtgatggaccccatgatggatcagtttgtctgcctccttcccaacctgtccagcagcgttgttgaccccatggccaagcttctctgcttcctttcctgcttgtccaataccatggttgatctcatgggcaaccttgtccatgccgtggttgagcccctggacgcctttgtccaactccttgccggtgtggctccccatgttgctaagtccgttgaaaaccttctccacttcccttccggcatgcgtgattccactgttgatgccatccagggccttgcccacctctctctctgcattgctcagccctcggttgatcccttcaatgaccttctcaatggggtcatcgctggccgcccatccagacagggcccccagtagcagaaggagggagcaggagccgaccagacgtgcaagatgcatattgctgggaaggtcgggaaggatgcagagaggagccagggaagccacgctgctatttatcctctctccctctcgccctcttctccacccctcatgactcaattacccctgtgaggcactgagttggtcttcagtcaaggaggtgtttcccagggagatttggagttgagcaatggagaggaggaggaagagagggtgagtcatggatggagaagaactctggcatctttgctccttgccctccaccccagagatgggtgtctgcccttccaaccacctcctctttcattcctcacccactgtccaggcctcctctctcgcaaacccaccttccaccatgctccatccctgggatgcaggcaattcttcaacacctcactcctctcaggcatctaagcctccagctccccaggcagtgaggggctagaatgatgggaggcaccgtctggagaggggagaacactaggtgggatgaaggagtcatcagacctcgttcttgtgggccagcccctgccctcactcattccattccagccacacaggccttctccctgttccacaaacacaccaagctcattcctgctgcagggcctttgcacatgctcctctctctgcctggaatgcagaacccagatcttcacgtggctggctcctcctcatccgtacttgacttaaatgccaacttcgcaagaaaacctctcctgaccataacatggcattaattatactctgtagtatcacccttttgttttcacagaaaaaaaaaatctgaaattacctttattttttattgcctgtctcacctactagcaatgtaaattggtcgtgttgatcactgctgtattcctagcttcttgaacactgcctggggttcagtaaatatttattgactggacaaatggatggattcgaacaggccaaggaaagagactccgagcccgagtctgggtctcacagggtgctggagggaagggcgcctgggtcgccagggcagcatagagtcccttgtggagtgccgcagattttggaggcaggatcccattcctgtcgcagaacccagacctcctgcctcccagcccttgggcaagggcagggggctgattgccacgagctggaacaggacgcagtgtctcctgaaaagccggttgaggcagccacggggaggggccgaagacccagggcagcaggagcctgtgagccagaacctgggctggggccaggccctcatccttcctgccctcccgacatggggcctcctaagccccaacctgaagccccaagtgttgacatattggctcgggttggaggggaaacagctgagagtctggcctcaggcatgaaaagggcatcggaaggaagggcaggtggtggtgggcaggcttggggcagcagatgcatctagaagccagttgggagggaggctaagaccagaacgagagccagtgggtgggtacagtaggtgcaggggtgaaagatatttgggttttggtgccaaggggagagactgagagaggggtggaggtgggattgctggtgggaaggccaggcaggaacaatgtgcagggtgtgagcagctggaggtggcagagctatgtgtgtgggtgcccaggtgtggcgagaatctgcacgtgttttcaggctttgctcaaacaaaggcgccaaggcccactcccctcagaggacccggggttcctctccagctcctggacacttgactccacccaaagacaggcatcccaggacagatatccagaagcttctgccttctctgggctctgcctatagagggtgactaagtgtgccacctctccaagcttgagctcatcaaatctgtttcccggtttcacactccagggacaaagccaaattcctgggcaaactcaggtgtggtttttctgccctggtccagggccgaaatgatggagtttcccataccaggaggtggctgggcagagaagagtgggtgatgagtgtcagaatcctaacccacccagagatcaagaggtgggatttctcccactttgaactgtgttccatcttctttttgtgtttttggagggagagtctcactctatcccccaggctggcatgcagtggcatgatctcggctcactgcaacctccgcctcccgggttcaagtgattcttctgcctcagcctcccgagtagctgggattagccgggcacctgccatgatgcccagctaatttttgtactttcagtagagacggggtttcaccatgttggccaggctggtctcgaacccctgacctcaggtgatccgcccacctcggcctccccaagggcagggattacaggcgtgagccactgtgcctggcctgaactgtgttccatcttctctatccctctccaccccatcctttcatcttctgccagcctcagtccctctcctctgtctctctattcccatgtggcacgattcgattcaggacttcagcatctggctccataactgagaatggcctggagttgtcctttctttattttatttattttttttatgaagtatcactctgttgcccaggttggagtgcagtggcaatctcggctcactgcaacctccgcctcccaggttcaagtgattcgcctgcctcagcctcccgagtagctaggattacagatgcatgccactacacctggctaatttttgtatttttagtagagatggagtttcaccatgttggccaggctggtctcaaactcctgacctcaggtggtctacctgcctcggcctcccaaagtgctgggattacatgtgtgagccactgcacccagccaaaatcagccccttttgaatcctggttttgttgaggttatatttttcacctccttgattgtacaccaaaatgtagctccctttgtttaattaatcatctgtgttttggtctcggttcgttaaaacctcctcacctgtacacttagtttactttcttctcccaggccatcaaagcaggagagcctcaccctgccctggtcccatggcaggtgcttggcaaatgaatttctcatggatgttggcggaaggaagaggttatgtcattctgccccttcttgcatccatccctctctgggatggtgactccttcctggcacaaacccccactccccctgaaccttggtcacagctgcgtgtcaacctgctgtgcaggtgatggtgcctgcctgtgagtcactgaggtgcaagcaaacccctaccccggggctgcaggggagggagctgtttgtccacttgttctttgtcagacgttcattgaaaacctgctttgtattgttctaagtgctggaggcacagtcgtgaacaaacaaacaagaacaggagccctgtgaggggcttagagcccaagggggagacatcgaacaaataaaccaatcagtagatcatgacaaactacatgaaaagctacaaggaaaagaatgggtgctgcgagaagatataacgtgaagagtttgataagattggcgatcagggccgggcgaggtggttcacgcctgtaatcccaccactttgggaggccgaggcagatggatcacctgaggtcaggagtttgagatcagcctggccaacatggtgaaaccccgtctctactaaaaatacaaaaacaaaaaaaaaattagctaggtgtagtggcgcacgcctgtagtcccagctactcaggaggctgaggcgggagaatcacttgaacccaggaggcggaggttgcggtgagctgagatcgcaccattgcactccagcctaggcaacaagagcgaaactctgtctcaaaaaaaagaaaagaaaagaaaagattagcgatcagatgaaacctgaggaattgacatttattcattcaggtatagtttattgggctaacgcctttttcagacagggtcttgctctgtctcccagctggagtgcagtgacacaatcacagctcactgcagccttgacctcctaggctcaagtgatcctcccacctcagcctccctaataattgggacaacaggcatgcaccaccacacctggctactttttttattttttgtagatacagggttttgccacattgcccatgttggtctcaaactcctggactcaaatgatcctcccacctcagcctcccaaagtgttgggattacaggcatgagccactgcgtccagcccacaaacacctttcaggtgccaaacacttttcttgtcaatgggatacagaagtgacatagatgacgtccctgtcctctcagagcttacagtctggtggacagagacagttggcaagaaaacaaacaatttttagagagacatgtgctctaaggaaaataaaaacatagacagtgtagccctagagaaattttgcacactgaagcataactcagaatggagaagtcagacaaggcttcctggaagatgggcagaaattgggaagggggtgacggctgacagtgacagagaaaggagggaacttagatgcagagtgtagaaagcctctcttaaagggtgggaaaccaagaggcagccaagggaagccctgggtgggccttccaggcatacggaggcagcaagagtcactccactggagaatccaagggacagcatggaacctgtgtgcttcaagagacagagaagaggaaagggctttcaggaacagtgtaaaaggtgggattccaggctgggtgtggtggctcgctcctgtaatcccagcattttggaaggccgaggtgggaggatcgcttgagcccaagggttctagaccagcctgagcaaaagagtgagaccctctctctacaaaaaaataaaaagtaaaaatagcctgcagtggtggctgcacatgtagtcc[134 bp omitted]ataattttaaaaagtgggattccattccagacggcagtgcgtggccgtggaacggtgatgcatagcgtgctgacgtcccatgcctctacggggatgggatgcgatggtgtcaggcctctggcttgggcgccgcccctcggcgacgtcactgggtactgtgacgtcactgggtgctgtgacatcagggcaattagcccaggacccacagccctggcgctccgcacgcacctcggtaacatcacagcaggtccaggccaatgataaccttataagaggccatgtcgaagcgcgacatcgtcctcaccaatgtcaccgttgtccagttgctgcgacagccgtgcccgggtgagggaggcagcggagggcgcgggggaggggtggaaagggtagtggggagcgtctgcaccctcacacctgtgccgtatccctaccgcccttcctggcgtgtgcaccatctagggaccaggggatcagccgctctccctccctccacacccgccagtgtgctggcagagtggggtttactgccatggcggggagaccgggcctccgcccccagggctgggtgggcttcgcgccgctatcacgcggtagaaagagcagaaacgagggccatcggaggctgcagcctgaaagtggcgggaagtgggcgggcttaggaggggcttagggagaacccaggggtgctgggcttccatgtaaaagtgatgttcatggcgcttcgcgtgaggtgagctttgccctccctgtgatgcacaaaacaaggacacttggaaccttgccggggacgtgctgaccacttcgcaggcgagagctcagggaagcctcaccaccacctgagaaggccagagtgtgcccgcagtttacagagcggccaacagaggttaagagagggcaaactacttccttagtctctcaacaagggcggcgcgcccgcgcgcgcgcacacacacacacacacactcactcactcactctagccggaggaaccaggtcttccggtgggctgcctccattcccacactgttccctcacttcccaagggcgggggccgcaggggtaggtggggctggggctttggtccaggagaccctggaagacacaggagcagacaggcttaccagcctcatgagacttgaacccctgccctgcgcatcactgctccgtggcctcaggcttcattttcccctctgtaaagtgggtttatagcgcatgcctctcgggattcagtgggaggacgcagtgaggagctgggggcagcacccagctagcccccaggcttttctccaaccgggggaccccacccctacagtggaggggaagagagtgcaaggctgggagtgctgggagaggaggaccatctgagttttcttcggaagggtcacccattgggctcagattcccacctgaaccaggtggacaaatcccctttctcccatagcagaaacaacccccaaggatgcaaacatcctcaagttcaccaataaacactaacaccttcatgaacttggacagccactggaaacacctatagtccagcctcaggccacaaggtctgtggcaacagggagaggtcagggagacagacaggccagctggcccccggctcccagccccaccaccccccaggtgcctttgatttggtgccaaaaacttggactcccactacccccttccagcccttctccaccccctgctgtctccctttcctcaggaatctgtgtaggatcagacttccctcctctattaaaatcagctcctatgtgtgggcctcgagatctcactgcgccctcacagcagcccctaggtgggggatcagccccaagaggttcattaacttgctcaaatccacagagcagcaggtctgtgtggactgagccaggcttgactttccagcttgaaactctctgccaccaggtcccctgagtctccacttctcccctcttctcaagccctcctctgtagctcaggcggctgctacctccaggcgcaggtgtttttaagtgcagtctgggagcaggagtgtgtgtggagaggtgggagccaatgtgagcttccatgggtttcacagagtatgatacacggtactctctaagcttccctgaggataagaaatgcctggagtgcttattttattttttatttttttttgggagatggagtttcgctcttgttgcccaggctggagtgcagtggcacgatctcgcccaccacaacctccgcctcctgggttcaagcgattctcctgcttcagcctcctgagtagctgggattacaagcatgtgccaccacgcctggctaatttttttgtatttttagtagagacggggtttctgcatg[139 bp omitted]acccactgagtccgatttttctaggaagagccctcctcaggtgatttttttttttttttgagacagagtctcactctgtcgcccaggctggagtgcagtggcgcaatctcggctcactgcaccctccgcctcccaggttcaagagattctcttgcctcagccccccgaggagctgggattacagtatttttagtagagaacaggtttctccatgttggccaagctggtcttgaactcctgacctcaagtgatccacccaccttggcctcccaaagtgccaggattacaggtgtgagccaccacgcctggccactccgacgactcctatcatggaacagtttggggaccactgggctaaatcaattattggacaaattcggggaacaatctacaaaatactaatgcatgtcaaacatttcctcggcttggtcataagcaatccatgtattacctcatttaatcctcacaacaaccctctaagaaaagtactattatctccccttacagaggaggaaactgaggcacagagaatgtcaccccaagcgatctatgttgaaagtacataccccggccaggcgcagtggctcacacctgtaatcccagcactttgggaggctgaggcgggtggatcacctaaggtcaggagttcgagaccagcctggccaagtgaaaccctgtatctactaaaaatacaaaaattagccaggcaccttggcgggtgcttataatcccagctactcgggaggctgaggcaggagaatcacttgaacccaggaggcggaggttgcagtaagccaagatcagtccactgcactccagcctgggtgacagagcaatactctgtctcgggaaaaaaaaaacaacggaagtacataaccagtgaattagaatctccaggaaagagcccttgggattgacattttaaacaagttcattctgtagagaaagtgggtttgggaaacactgggctaaatggttggtcacgaggggccaggagccagcaacagattctgggcagcaaagacagtttgttctctttcactttggtggtcatgcaacccattccctcccttcccccgcatagtgaccagagcaccgcccccacctgagcctaaggctgaagtagagccccagccacaaccagagcccacaccagtcagggaggaaataaagccaccaccgccaccactgcctcctcaccccgctactcctcctcctaagatggtgtctgtggcccgggagctgactgtgggcatcaatgggtgagtctactccagcccctgatcagtctgaagccttagagcccagcccctcctctggctgctaactgggggcacctccacatttccccccatcaatgctttcgttccgacgaccctggagaaatagcccggagcaaggcagacagggccccatgctcagcagcatgctggtggggaagacagtaatcaaataaagaaattagattgttcagtagagtgtgctgggaacagtgtagaatccagtggaaaagtcaggctggagagggcagcctttgccagtgatcagggaaggccttggggagaaggtgtcattggagcgggaccagagtgatgagacacagccagctcccagggcaccttgctggggaaggagtcttccaggcagcgggacaagcaatgattctggggcagaggcgagctcagtatgttcagggacagccaggaagtcagagtggctggtgtccaccaagcaaagggaaaaggagggaggccagtgagaagcccggagggggctgctacaccacagtaaggagtgtggatcttgttttactgatggacagtcgtggatgttttcatgccaagagacgtaatctgtcttgaagttttaagatccatccaggctctcacacctgtaaacccagcactttgggaggccaaggtaggagaatcctttgagaccaggagtttgagaccagcgtgggcaacatagcgagactctgtctctacagaaaaaaattgttttaattgtttaatgaaaaaataa[136 bp omitted]acatggcaaaaccccgtctctattaaaaatacaaaaattagccaggtgtggtggtacgcgcctgtagtcccagctacttgggaggctgaggcaggagaatcacttgaacccaggaggcagaggttgcaatgagcccagatagcgccactgcactccagcctgggcgaaagagctggattccatctcaaaatatatatatatatatatgtatatatgggttagggaacggattgggagagggagctgaaaaagcagttaaaggggctggtgaggtcatcttggcaagagatgcccatggccagcacagaggttgttgccttcttcccctggattaaggattcccaaccaggctccttgagggagcctcctctccattacccccttctctcccatcccttcctgtctgtccctggccagatttggacgcatcggtcgcctggtcctgcgcgcctgcatggagaagggtgttaaggtggtggctgtgaatgatccattcattgacccggaatacatggtcagtagctggcagagggcaggaacagcagggtgggactggggtgggaaagggactcagggaagctgtatggaaggctctcagctgtaatgtgagaccttcaccaaagaggggactctctagggatcctcaccctgccaccccaagactaggagccattccatcccccacaggtgtacatgtttaagtatgactccacccacggccgatacaagggaagtgtggaattcaggaatggacaactggtcgtggacaaccatgagatctctgtctaccagtggtaaggaaagcatctgtctgatgcacggctgtgacatattgaggcagggcatgtggaggtggctaaaatgggattccagcctctcacatggggtgctgaaaccacccccaaaattgcgtgtgcatgcctctaggtactaatttgaagagggaagtctcaggtccttcacccctaaaatgattaagaagcactaatctaaaaagatgcctcactgtactgaagaatgctttttctttatattttttttagggacggggtatcactcttttgcccagtctggagtgcagtggtgtaatcatagctcaccgcatccttgacctcccgggctcaagtggtcctcccacctcggcctcccaagtagtgggcaccagccaccacacctggcaaattttttgtagagatgaggtcttgccatctggcccaggctggtctcaaactcctggccccaagcaatcctcccaccttggcctcccagagtgctgggattacaggcaggagccactgcattttgctttaacgcacatttgcatgttttctcgtgggcatatcaacatgtccagaactcaactcttgattccccttcaacccacacctattcagctcccattgaccactgctggtcaactatgcctgaattccaaagggaggaaggtataatgaggcttgtgcgaacatccgaacatccgttcccatcatggcctgaaccagtgtttcagttttactttagaatgccctgggccgagagaagggctacattcagttagttgggggagtttagaattttatttttggctgacattcacctttctaatgtaaactattagcgactcctggctctgtggctgcctggggcttttacacatacacacccacaggcccacacacatgcaaatacacacaggcacactagtgaaccctgtctgggcccaggcagggtctgcagcctccccagcgcccctccccacagatctaatctcagcccttctccttgtacttactgggggtagggtgagtgataaaggggcagggatgggtgcaggaagtttgtgggcagggggcagagactggagagtcagtgaaaattgaagaaagctgcttaacccaagtttgaaatcatgacactagaaacaactccagcaccatagttatcacgcagacttcaacgtggccaccaccattaccgccacttggagtcatccctcttccccacctagctgccccctccgtccacggtcccgactcaggtcttgccttctctggtcacttgtgcaatgcagttccccgcccctccagccccctctccatccccgcactgttgggctgcacaagccaggctgtgtgcctgcactctgccctgcacctccgctagctagctgggtgaccttgggcaaggaaccaaacttgcctgagcctcagttccccgctgtatctgatggggatgatgagcaaacccaccacagcggtagctgggagcacgaatggagtgaacatgtgtttgtggacacttaaacgggcacttcccacaaggccatggccttgcacggagggctctgtcaactggtaccaccactgttgctctggcattagcaggtacaggccctgatagccattcagaacttcctttgaatgaatgaatggaatcctcaaaacagcctggtgggcaggaggctggggcccatgacagccttggggagggcctggggtcttctgggggcacagtctttgcctcaggccaactcagcaattgttgcagaggaatcgcaagtgtccctaatttggaaggcaggaaatggggggtatctgagaagagctcgttgggccagatgatggaaagtggactgacagagcaggagacaggaagaggataaccatgcatgtgtgatggctttgcagggcagcccattcattcattcattcaggcagtggaaacaggagtgcagacccgaggtgggaccagccacctgcactccagcaggctctccctctcactcccctcccctctgccctgacagcagtaaaaaaatgcaaaaaatgacagcggtagcacttcctcatcgggttgtgaaggttacatgagtttaatgcaggtaaggcacttagaatatgggcacaggacaggtgttcagtaaacacgtataaaatggctaactaaaaaaaaaacacgaggccaggtgcagaggctcatgcctgtcatcccagcactttgggaggctgaagtggggatcacctgaggtcaggagtttgagaccagcctggccaacagagcaaaccccgtcaccactaaaaatacaaaaaacaacaacaataaaaaactagccaggtgtggtagcgcatgcctgtaaccccaactactcgggaggcggaggcaggagaatcgcttgaacccggaaggtggaggttgcagtgagccaaaatcgtgccactgcactccagcctgagtgacagagtgagactctgtctcaaaaacaaaacaaaacaaaacaaagaaaacccatgaggccaggcacggtggctcacacctgtaatcccagcactgtgggaggtcaaggatcacttgagcccaggggttctaaagcaccctgggcaacaaaagtgagaccccatctctacaaaaaaatttaaaaattagcttggcatggtggtgtgcgcctgtagtcccagctactcgggaggccaaggcaggaggatggccggagccaggaagatcaaggctgcagtgagctctgattgcaccactgcactccagcctgggcgacagaggaagaccctgtctcaaaacaaacaaaccccacaaacattgattgaaccccccattgaggggagcaggctcaatggcaaaggaaacagaccgacactggccaagaatcacagaagcaaagcacccggttactcatgataaacctgggaaggaagaaagtggaacagtttattcacttaatgcttgtttgctaaagccaagtagaaaacggcaatactagatgtttagtgtgcttcaaatacaaatgtttgtcaaaataccaagtaaaaacataaatttataaaacaggaaaccagaaacctcccttacctttccaatgtaaaccatgagccactgctgccccaaggctgcctcaggcttcaggagtcctccaggagctttttctttaatgcagtgtctgttttcagggaccctcctggcctttggcagccagcttcctattgcaggagctgagggtctaggagggttcatggcgaggttgtcagagctgggaagcagaaagcagccgggcaggcctcacagtcacagagtccacgtcccgggcagcatatggagaaagggtctgggctggctgacagcagtcagcattggcgcctctgaggaggttgagggctgagttggggaggtcaccacctgtacccaggcataacaggggtggtgcaatcagcaaagggaaagtggtctgaagtggggcagtggtgaaaagctaggccagcggggtggagcccatctggaacaagtaggtgtgtggggtaggggacgcaggtggttgcaggtgggccggtacctgctcagcctgtcaaatggtgaaagccatggactatgaaggtggggctcaagcaggggagactgactcagccctgccacttccccacagcaaagagcccaaacagatcccctggagggctgtcgggagcccctacgtggtggagtccacaggcgtgtacctctccatacaggcagcttcggtaagctggggagaggtgcccagggctagctggggggatgatggtgccagaagcccctgacacctgcgcttcctccccaggaccacatctctgcaggtgctcaacgtgtggtcatctccgcgccctcaccggatgcaccaatgttcgtcatgggtgtcaatgaaaatgactataaccctggctccatgaacattgtgaggtaatgtgggcagtgacatcctgcaatgtgtggaagggagggtagactcgtcctccccaccctcagccccactggattcctggtcgcttggcttctgcttctccttcccgaaactatctgctaaaaacgcatgacttccagaggacaagcttggggagcctccccagctgcacctcagtgcctccttcagtctgacagtgtccccacagatccctctcaccctcatcctgacgtttcataaaaccaagtctgcgtgcataccccaagaggggtaagggtggaggggtggctctgcgactcacctcacagtgtccgtgcacaccttggctgtttcagcaacgcgtcctgcaccaccaactgtttggctcccctcgccaaagtcatccacgagcgatttgggatcgtggaagggttgatggtgagttgaggatgaggggctggggcaggaaggatggcagggaaacccaacttcttcccgggccttgcttactgtatggagttaagagggagagactggtttcgggaggagaggcccaccagtgcagaagtcacttaaaacactgtgcaaccctcaggcaaggctggaccctggcctgcacacatcccctcctgtggtctgtggtggtggccccaccagcctccacacctaggccaccaacttagtcctggaaaaaagaggcatgggagcttaggagcatgaaggcctcatcttggtccttctcttccccaagaccacagtccattcctacacggccacccagaagacagtggacgggccatcaaggaaggcctggcgagatgggcggggtgcccaccagaacatcatcccagcctccactggggctgcgaaagctgtgaccaaagtcatcccagagctcaaagggtatgaggacaagaagctgcaaccagggtgggggcatacgccaggaggactggactggcccggccctcagtccttaagaggaaagcaggggcctggcccagccacagggaaagggggaatggagggcaacgtccctaagttctgactcctgttcctcatgggggattctccaggaagctgacagggatggcgttccgggtaccaaccccggatgtgtctgtcgtggacctgacctgccgcctcgcccagcctgccccctactcagccatcaaggaggctgtaaaagcagcagccaaggggcccatggctggcatccttgcctacaccgaggatgaggtaggggctgaggagaggagaccctgggaggagccctctgggaagggacatgatttccacttgccagggagctgctctcaatgtgccaagtcagaaactgcagggcaggaagggagatctccctgcctcagggcctttgcacttgctgttcctttagtctggaatgcttcccttgccaggtgaccatacagtctgtccttacttcctccaagtctctggaggaacctccctcttcagcaaggcaccccctcaaaatatgttctttttgtggccatattcctcacctgaaatttcatttcatagtcactgttggccccagtggtgtgtgcactccaagaaaacagggatttaggggctgccttttcacttttgtggctccaacctggcatacagcaggtgactaatacatgcttagtgaacaaaagacaacagctcccatttttttcaatacttgctcagggccaggccatggccagatgccttctctgtgaggagtggatgccatggtcatggtggacccctgtacatccaccttggtgctgtctccctgcattaactcctgcaggtccactttcccacagtcactgggatcttttgttttaatggaatcacattgcatcacccgttttcaggattgaaaacactcctgtggcctttcatgacactagggctaaaaccctcaggtcctcccttcctgcagctccttctacctcagacactgtgctgagggccccagccggtcagatctttctagtcatctagacccaggctcatggccacccctcagagaggccctccatgctggcccattccaaacgcttgcattattcctaggaaagggatgtactggtacagcatgagggtgtttgtgacctgtgccctttggccagaccctgacacagtgccttggtcataccctgcacttggtcataccctccagtccagagactggacacagtagggctacatcaaatattatagatgaatgcatggatgggcgatagagttaagagtcggggcctcagctcctggaggtccttgctctgccggacacacttatctttgaaattctgacttccaggtcgtctctacggacttcctcggtgatacccactcgtccatcttcgatgctaaggccggcattgcgctcaatgacaatttcgtgaagctcatttcatggtaagggggaaggagctggagacttagagggaggggaactaaggggtggtcggaaggaacccccttgaacctcccgacccctcctccacaggtacgacaacgaatatggctacagtcaccgggtggtcgacctcctccgctacatgttcagccgagacaagtgaaacgggaaggtcctttctttccttcccaggggccggggccggaacatgtgcctcccgttccagcatctggctgcccgggggaggaaggacacccggggcgggcgccccacgccgatgggtccatggtgaaataaaaaacagtgctcacggctgcgtcccgtatctctgcgccggtcagggcgggttctgatccgggtttgaggcccgccccacccttactcgatcgcctgcgcccacgggcgaggggtcgcgctcgactccaagccgggttccacttcaggagaccgggaccgcgatggcagcggtagaggccccgcatggccggaagtcactccccaaagcgctgggccggcagcggtgggacccagggccggccacgggctctctgacgtcactgggcgcgacgccccgcgccgggactactgctcccagaaggtcgcgcgcgggcccccgccagtcaggtgggtgccaggccctggccgtggcgaaagagccggcggagccggagacccgctcccggagacgccgcctcgcgatccccgcgcgggcgggaccgggcggccggcatcatgaccctgtttcacttcgggaactgcttcgctcttgcctacttcccctacttcatcacctacaagtgcagcggcctgtgagtgcgggaagggcgcggggcggagagggcgcggggcccgggccgaccctcacctcccgcttctccaggtccgagtacaacgccttctggaaatgcgtccaggctggagtcacctacctctttgtccaactctgcaaggtgagggccaccgggaagccacgtgttctggcccccaggctctgcagacccagggacccgcccccgttgcctatccgcgcccccgccgccccacggtgggaccgccctcgggactccgcactgggaggcgtcaggatacctagagaggatggactttaaagagggcacgacctgagaagagacctagaagcaacttttgcgtagcacttagtaaaactgagaaaacctcagtagtgtggttggctaacaggttttttttggtgcggttaagagtgatcactgattccgtacgtgctgctaacactgcccaaggagcagcaccttcagacctgactcagatgccctgtgatcacccagaactcaaacttccagccccctcggggacccggggacctatcctctatctccccgattcctgtaattttgccaccatctggtggttcctcttccagatgggcccccagaacctgtcctgccctcttcctacccacgaacttcccacaaatcccacgtggtttatcttgatcccctcaccttgaagtgacctctttctgctttctgttctcagatgctgttcttggccactttctttcccacctgggaaggcggcatctatgacttcattggggtgagaggggccagggaagggaagggagttcaggaatggggctccctgtccccctgtgcttacttaagcctcaacctgacccgcaggagttcatgaaggccagcgtggatgtggcagacctgataggtctaaaccttgtcatgtcccggaatgccggcaagggagagtacaagatcatggttgctgccctgggctgggccactgctgagcttattatgtcccggtgcgtacagcagcctggagcccagacccctgagaagggacacctgggttccacgggggtgctggagggcaggggctcaaagcctggtgctgaaggtgtctgagtactggagaatcccatcctttgccttcctcagctgcattcccctatgggtcggagcccggggcattgagtttgactggaagtacatccagatgagcatagactccaacatcagtctggtaggcagtcgtgctctcccacatacacatttctgctggcggccatactcctccccaaggcctggccccgactttctgcctccctctaggtccattacatcgtcgcgtctgctcaggtctggatgataacacgctatgatctgtaccacaccttccggccagctgtcctcctgctgatgttcctcagtgtctacaaggcctttgttatggagtgagttgggtggggtttagggctgggtccaaagtggggtgggttatctagtctcccttccttattgtgacattttcctgcaggaccttcgtccacctctgctcgctgggcagttgggcagctctactggcccgagcagtggtaacggggctgctggccctcagcactttggccctgtatgtcgccgttgtcaatgtgcactcctaggcttggtgtctcagacattgatgtaccttttccctgcctcactccaggttttagtgaagtaaacagtatttggaaagttgttgctgcctccatttctctctcttgggaactgtctcccaataccgtgtccacctgggtctcagaggccctggttctgtctcaggagccaggtagacaagctggaagctagccagtcactgacttgtcccatgtcttgttcctcaggctcctggtttgccaggagtagacagaaggtttggatgatctttgagcagtggcagaggccagggccctcagggaacagatgatagaggggagctagaatccaagagaaggcccttggggggctcttcctcctcacagccccaacctgggcctcctcacatgggcccttcccgggctggttgcctctgaggctcctggccccagtgtccccctccaatccatcctctgtatggcagccaggggatctatctgaaacccgtctaaccaggtcatcctcccacttgcagccacttgcggccccttgttacacagtggacagtccaattgcttggcctttggttttacccaaccagcaaaaccagcttttctgaaactgctccctagaataatttgtccagccagattcttaacatcgttcaagccatggggtcagcatggggctggggggagagttgtgactgtgagctcctcagttctatggccctcagatcagatcccagcctgagccttctcagggtggagtggagagacagctgcagccaagaagcagagcagtggggcccccagcttggacattgtcctggatgcccccctccaccctcagccttccttggtccactgaagccggctccccgcctttctctgagggggatgtgtcagaagttttgaatgtcatgtttaagctccactttgatgtacaccctccccactcaggaagatgctccccatccttggtgttcccagtggggtaccccagggagtaggatagcaccattgcccctcctcctccaccaggccgttgaagttccacctgattttttttaagcttaggcctaggaaagctcactatgaccatctcgatgtttccagagggagcatttgccttcagacggcagctgccatctaggccactcttcctcattgtttggagtaaagacagggtccatgggtctcttgggagctggaagtgattgatcaccttgactttgatgtagaaaggaagtagatggggcagtctatctgggtggacttgtgacaaggtcactttctcccacacttccatgccccacatagctcttcacacatattgagacaagtgtaggatgcaaaattaccaactggaataatcccagcttacatggggttcagggagagagactggagtggctgggcctgagttggcagaggacggtgaagcctgggcggttggactgtggggagccaggcttcaggtgatcggggttatgatgggaaaaccccgggttatggggacccagaggagccgcctggcctgccgtggaagcagtgcgggctcccctgagcagaggacatgtgagctgagacctaaagaatgagtgattggggcaaggcagaggtaatggtcttgaggtcagagagggggcctgtttttcccaagggaacataactggttggaatgagttcaaggggacttgtaagactacagaagctggcaggggtcagatcacaggaggctttgggaaccaaggagagctctaggcagaggaaggacagggtcagatttggctttaggaagctctgcatggctgttgtctgaaatgggaaagctgaggccacgaggccagggctggaccagggcagggctttgtggggttaggagagtgactagaagccaagcccaggtgttggtgatcagtggctgtgtgtatttatttaccggcagggggcgctaacaggtaagggaggagcaaagagttccaggataactggagtttggggcttgtaagcccgagggctcaccacgtttccaagggagaagggaccacactgatgggacagtgggactatcagattgggtcagtgcatgggtacaggcatggggggtgatgaagaggccagtgtaggtcaccaacactgggggaagctggggacagaggtgggtctcactgcagaaacaactgaagccatgggggactggggggctgtggtcacaaggaaggagaagcccaggccctagccagagaaagccacataagaaagaggaagagaggtgaacagaggggctgggaaaggagcggcagagatgggaggtagggggatggggttaacctttcaggtgaggggtgtgaggaggggacctccaggagttgttcaggaactggccattgccgggacagaggagtaagcaggtaggctcagaaaggagacaccgctggggggtgggggatgcttgatgtggaaatgacttgggcccccttgtgtctgggagcctccaggagggagaagggtgctgagaacagagaaagcccagaggtggtagggggtgcctatcgccacggcccagcttgcgtttagatgccatgaccctgggcaaaggaataggaatcatttccccaaggcaggtttattgaggacctactatgtgccaggctgtgtactaggcactggaggtgcagccctggataaacagcccccatgtacaggactgtgggagatcacaagcactaatgagagacgctgaggacagtgcctggcaccagatacagcacagtcagcatgagctggttttattaccatcgcccaggacacaagcgtgtctttaacgaagggccctcaggcagccgtccagcctggactggagtcctaagaacagaaacaccctccagaagcggtcagctgtactccctgtcagagccccaccgccaccacaggtggcggctttcccgaggccagcccagaggactgcccaggcgctgctgctccaggaggtgcgaaccttgggaatgggggaggggagtgggcaggtccctccaagtttggggtgccgtgggctacagaagcagatactggtggggctgggactcttggttgctcagatatcttggtggctgtccagagggtcccacgagccctgcccccacctgctgtggcagttgcagggatgcttgaaggcagtcgtccctctaatagtagagttcctggtcccaccagcctgggagagagagggagaaaggagactcagtgctgggggtgccacttaggcagggccaggggctcagaggtcagtgctggttgctatggagggtcaagggcttagaggccaagtgttgaggatcaaaggtgggtgcagctgctcaaacgtttcagtcccctgcccccaggctcccagtctccacactcactccctgggcaacagcgaactccaagcttccggatctcatcatagacgaagatgaggatgccgtagggcagggggaccagccaccactggaacctgaaggcacatggcaaggtgaaggccatcccaggcctgtgccctacagccccctccctgtccttgcccctcacagcctctcaccgaatgggcatgaagttgaagatgttgggcatgccggggcagtagcacaggaagcagccgatgcagacctggaacacgatggcgatcaccaggatcttattcctgggggtgggcagaatgggacaggccattaggaattggggacgtgatggaaatcaggatactgtgggtcaaagtaggtcagatgtcagcagcagcagggaggtgttctacacactgaacactggagtggcccgggcctctcagcaccacccctttagtgaaatgtggagggggccgtggggggagttattggccagttagaaaggtttttttggcatgtcaccatctggcactggcacccgctggcatttgccggctgttctaaaccacagtcaggatctgatgggagttgggaccaggggttggagggcaggaagagggccagccagggacacctgaagaagccttgctggaaggcagagagacggcgcgtcttgcggatgaggacatcggcgatctggcacacctcaatgctgatgaagaacacggtgtagcaggtgtactgctggtacaggcgctgcccgaatgtctgcaggccaggggcaaacggaaacagcctgagtccagcctgagtcccggcggagagcctctgcagcccaccgggcatagggtcccagggccgtgaacccctaaatgctctctctgccttgcatcagagtgtgggggtggggggaaggagagaggcagggtctgccaggtgtgcaggaccccagaacgtggggcccagaaacctcagcctagcagagcttggatgacagtggccgggaaaactgtaggctgggccgactgctttcatagtgaaaggggggaggcacccaaaagaaagggcctgggaaaggggaattgaaatcctcagatgggatttgcaaagtccagtgactccaggggccaggcagatggcaaaaataggtgaggcagtcaccgcgggcctttgggaaaagagggcagatgccccatttaaagggggcagccactatgcagcccatttcttcaacacagctacttttttttttgagatggaatctcgctctgtcacccaggctggagtgcagtggtgcaatctcagctcactgcaacttccgaatcccaggttcaggagattctcctgccttagcctcccaagtagctggaattacaagcatgtgccaccatgcctggcaacacaactcctaataccagctaactgtggggatcactgactgctccaggtgccgagtgttgcacgtgcattagctcatttaatccgctgggtaaccctaggaggtaaatcagtggtgctggaacttgaacatgcatgagaatcccagcaagggctcccagagggctgggatagagcctgagaatttgcactgcaaacatgttcccaggagatggtgatgctgctggtctgggagcaaactgaaaaccactgaggtagactttgatattctctccactttgcaggtgagaaaacaggcacagagaggcaaagcaacctgcccagggttacacagcttgtgagaagcagtaccagaccataagtccaggcagtctggcttcagtgtctaccttaaccatgatagtaaatgtttaagggaagtatcctcgtctgtatgtaactctacaggtgaactaaacacatctgctggccagatctagcctcactgtgctccaaaccttcattaaaatagaccacatgtgcaaataccctgtgggagtgatgctgtagggaaaatagcagaataggggcctggttccacatctgagatgatgcattagtgtcagggcagagacacccatctgcagttgcgatcatcagaagcaggagtttggagctggagatggtgggaaaggcccttgcccccccgaactggcagggagtctgggggtccgggatgctctggctgaactcagtcacacgtggaggaacaagtgggccgcacacaaggcaagttgccctgggaaggagggagcccagggatgggatggggcggggcagggctcacccactcctggccgtagctgtcctgcagatcttgtaggtggtggtcctcccactgcgcccgcagccccacgcacagcagtgggaaccagccctcctgggccattgccgtgaagtagtcagtgaagccagcaaaggactgaatggcacctggagagagacaaggggacacagggagacagagatggacacagagacagggacacaggaagagagggacatggagagacagggacacagatacacaaaggtcaaggacacacagacagggacacgggaagagagacagggacacagatacacaaggtcaaggacacacagagccagggacacagaaacagtgacagagacacagaggcagagagagaagcagggacagagagacagaggcagggacagagagaaaaagacacatccaggacccaaaaagacagaaataggcaacaactcagagacagggtcatggagagcaaggtcagagagagagcagggacacagcagaaccagagagactgtcacaaacagagagggacacggaggacaacggagacccaggaccaaatgcagacactgaggtccagaaccagccggagcccaaggcagggcctggggcaggcgagcagcccagcgcagagccccccacctccaggctccccggcccacgggcacccaccaatctggaagtaggagtaggcagccaggggctcgttgaccaatctgtcacgctttgggttgcgtggacgcaggtgcatgatgtcactctcggccttttcatatgccagggacacagatgggaactggccaggagtggaaggaactgggactgagggtttggctgggcccttgtcccctccacttcgggtcccccttcccccacttgtgagcaggaacaggactgaggttagcaggcaggacctgcagggacggcacagccacaccagcctggacagcctgggccccactggcccctgggtgttggcatcctggtgcccatcttcgtaagaacatctgcttttatcttctccctctgtctccctccctctctttctctgttcctcactctgtttctctgtccctgtctccagtgtaattctctgtgactgtatctgctcttgtgtatttctgtgtcactccctatctctgtgtatcttcagtctctcagtgtcgccgtgccccttcatctgcttgtgcctagagtggcagcagagcatactgaccacgaccacaggctgtgggacctgtgactgctcaagctcaagtcacagccgggccacttatttgcccagtgacctgggacaatccactctacctgtctatgccttgatgagctcatcagtaaagtacgggtgatagtaacaaaactcatctcatagtgtggttatgagtacaaaattaaggaaatgatggtgtgtctggcccagagaaagcactgtgtaaatgttaccgaataaatacctgtcaacacagctgcgcctctggctgcattcgtgactgtatctgtggttcttttctgtctgtctgccatggggtctatctgagggggtttatttgtccgtgtctgtttaggggcacgtgtctgtgattcaagtttggccagatacctgttctgtttccatctctgtctgagtatctgtatctgagtcatgtgtgtgcatgggtcggcccgggcctacctgagtgtccgcctgtgtgtgcatggctgtatgtccatttaggtctgttcacctgcctgccacccatgtgtcctgcactggctgtcattgcacacacaggtcttgtctgtcactctgtgcccaagagtgtctgtggtggtctctgtccctcctgtccatctgcaagcaagtgtctctgggcaccctgtggatgggtaccctgggctgtggacttacaatgtcagtgcagagttcgatgaagaggatggtgatgcacccgaggggcaggggcacgctgacggtgatgtagatgaggtagggtgtcagctctgggatgttcttggtcaatgtgtaggcaatagacttcttcaggttgtcgaagatcagtcgacctgtggggtagggtgggcacctcagcctcctcacagccctctccctcctgtgcccacactgcctgccctccccctggcgtggctcggaccctgctccacgcctgtcacaatggaggcaaagttgtcatccagcaggatcatgtcagctgcatttttggcagcatctgagccagcgatgcccatggctactccgatgtctgccttcttcagagctggggagtcattcacaccatcccccgtgacggccacaatcgcaccctgcaggcagtgggtgcaggtggtgggtgggtggtcagtgagaggccggtccaagaccagccccgcctgtctgcccgcctgcccaccctcatcagcagggctcaccagccgctggcagctctccacgatcaccagcttctgctgggggctggtgcgcgcaaacaccatctcggggtgggtgcgcagggcctcgaccagttccgatgggtccatgtccttcagctgcatgccattgatcacacaggcacgggcatccctggggaggagatgggaggacctcgctgggacctcggtctgtgccagatgtggggagaaccccggggaggtctgggggggcttacttgcgattaacctggtctacgggcacacggaggcgggcagcgatgtcctccactgtctcgctgccttccgagatgatgcccacactggctgcaatggccttggcggtgatggggtggtcacccgttaccatgatcacctgtagggggaaccagtggatcactgaccccttcagatcagcccaatctccctgtcctccctgggagacatctgctgatacacgtgttcatttacttgaccaagcgtgaccacctcctacgtgcctgggatatagcagagacaaaagagacaaaaatccctgtccttgaggagctctagtgagggtgacagaaaataaagaaacgaattatatagtgtgttagaaagtggaaaaaaacatattaagcttggtgaaggaaacggtgactcgattttaagtgtacccagggaagggcttattgagaaggtgatatctgagcagagacctgtaagaggtgagagagtcagccacgtggaaagctgggagaagagtgctcctggcagggagaacagcaggtgcaaaggccctgaggtgaggacaggcccgaactgtcggaggaacagcagggaggacaccataactgcagaggagtgaacaaggaaagagggctaacgaacaagcttagaaaggtaacaaggcccgatgtaacagggccgtagagacacgggaagggcttgggcattgcctgcctggccttggctttcccacccttgttttgtgtttggggaaccactcctctcccctacaccatcagttgcagtgaggtccctggctaagattgggtaagtaagcccagacctggccaatcaaggtcttccatcccccagccccagtgactggctcagggataaatgagtgacccaatccagtgctactgcaaaagaggcactctctttttgtggggtggctaagcaggtgggagttaagtttgagctgctggagcaggggtgtgtgtgtccccaagtgaagggagtgcctgcaaataaagccagcaaagagaacagcagagctgagacatggagaaaggaaaattcctaatgacactgagctcctggatctggctagacctgaagcttaattccccagaatttttcagtatcataaaccaatgcattttggttcaagccagtttcaggtgggtttgtcatggggttcttcaacccaaatcctgctgccatcctctgtcctcactccacttgttcctccccacagtggcatacccggatgcctgcggtgcgacacttgagcacagcatcagggacggtggcccggggtgggtcaatcatggatacaagtcccgcaaagcagaggccgctagatggaaagttcatggcctctacgtcgaaggcatagccaggcgggtagtccttctcattcaggtagagctggcagaagcctgaccggaaacggggaagtcagggaagagccctgggcacaccctttcttagcagggccaggaaatgggtaaaataaccaggccccttgcaccaaacacctatggatgcctgaccttgtgctgaccccttcactcacattatctgaatctaccctcacaaccaccctgtgaggcccattctcatcttacagatgaggaaactgaggctcagagaggggacatttcttgccagaggtcacacagcaagtaaaaggcccagaattggaccacagatctgctttctagggtagaggcagcgaagtttaaggcgtcaggacaaaaattgggagaggttagaggtcaggatacggataaaagtccaggtgaggactggggtcaaggtagaaagtgaggacagacaggggtcaggactggtacagggaaagtcaagggtgaggctgtggactgcgacaaatcagccagcagccagggatgaggacggtcagggctgggccgggagtggtgggcagggtctgtgctagctcctcctcgcacctggagtctcctcccctgcccaggggtctcaccgagcacgcgttcgcccaggcctcccaggctgaggtaggcggtctggaaggcctcgcgccactgctcgtccagcggcagctcctggcccttgataaggatggagctgcagcgctccagcacgcgctcgggggcgcccttcatcaccagcaagtgtcgcgggtcccgcgggtcctccagcgtatggatggacagctgtgggcgggggggagaggcgaggctgtggacgggggaacggggcggggctgtggacgagggaacggggcggggctgaggagaggggcggggccgagagctcggtgcgggctctgagagctgcggggaagggtgaaggtggaagatggaggccttgtgtggaggggtccttggtagaaggtaagcgttaaggcggggctaggtgcagatttggagtcctggacgcagggaatgaacagaattagggtgcggagttgggctgggggcggatttggagagcgaggtgctccccatggacagtcccgccgaggagaagctgtgggcggggctgggtggtgggcggggccttgcctctggtggacggggccataggcggagcgggagatggggtggggtttggctgcggagagaaggggcaaggagcgaagcccctcgtggcccgctgatgtgggtgtggcctggggcggggcccgaggtgggcgggcccaggccgtgggcggggccggctgcgcacctggaacttgttggtggagttgaagggtatctcgcagacttttgggaagcggtcccggtagcccatggcgttgcccagcgtcagctccgagaacttgagcagcgccgtctccgatgcgtctccaatcacgatgcgctgggagcggggaccggtgtcaggggcgaagccggctacaccagcctcccgggattccctggaggccccctggctctcaccttgggcacaggcactgcatcctggccggacttgaaggcggcgcggttgcacagggtgagcacccggcacagcgcccgccacgtctccgaggactggtcaaacgtctgccctgcagaccaggcgtccaggctgggtcccgcacggcggctctcccggaccagaaccgagccccctcctcctaggctcatatcgcgggccccctccccagacctgggtggaattgggttccacccaaccctgagggacccagcccccggatgacccttccctctagacccggtagcgagtctcctttgagacctggagccgagccgccccgccttcgtacaaagccctccctacctccctatccctcttcaggtctccaccatccaccagatcctgccctggcgcctgtgccctccctcccccacacctgactggtcttccgtggtgtcagctgtgtggatgtggttgtcaaaccacagatgggacacagtcatgcggttctgagtgagagtccctgtcttgtccgagcagatcaccgaagtggagcccaatgtctccaccgcctccaggttcttgaccacgcagttcttactggccaggcgcttggctgtcagggacaggcagacctggggaaggggtgagcaccgcaggctggggacccaccctggcttccagtcctcttccccgcgtcaaagaacggggaaggctttaccccagccgcggggctgcgtgtgcaacgtgcttctgcaaacaccaggtgttttcttggccccagcttttgttcagccagtgctttgtttgggactccttccccagtctgcccagatacagtagcgaggcccctctctgagctgtcccagccgaggttctgaaaattctcttcacacaatcaaaatgagaagaggaaccttccccgcacctccctggggactggtctggagctgggtgctgactgtggaaggtctggtgacatgctggctgcctgcacaggacatcagcctcttccagttaaggacccggcctcgtcatctctgcgccctcaatgtgtggcacaggacttgccccagggttgcctcgggaaggacttgctgaatgagtggatgatgggaaggcaggagaatggatgggagctaagtggacagatagacaggcagggaggtgatgggggaaatgtggaggaaagaacagatggttgagcaggcccctcagctccctgcatccccgcctgcccccactcactgtgacagtggccagcagcccctcaggcacataggccaccacgatggccatgaagaagaccatggcccgcaggaaggtgtagccaatgcacatggccacaataaaaaatgtggcaccgaagagaatggccaggcccgcgatgatgtccacaaaatgctcgatctcgatagcgatgggtgtcttctcgttttccacccccgacgccagcgatgcgatgcgcccaatgatggtgcggtcgcccgtgttcaccaccaggccctgcacggtgcctgcaggggggccaaggcgcgactcagggatagggggcggcagtggggtgtgcactgccgtgtgagctgaaggacagccagtcactgccagtggaggatgtgacctgggagagggtagtgacagtgggagacagagaagcagtgtgccctggggaggtggcagtcacggggaggtggcagtcatgcaggagagagacagggaggctgaagccccctgtcctagaagatagcaggagagaggccagtggaggcagcagttactgggcaggcaggcgggggcttcacagaccctcaaggcacatggtggagaagaaggcgatgttgcgggtctccagagggctctcgtgcgtgcactcgggtgagcgggtctgtggctcagactcccctgtcagcgaggagttgtccaccttgcagccctgggccgccaggatgcggatgtcggcgggcactctgtccccacctttcatctccaccaggtcgcccaccaccagttggtcagcgttgatctggaatttgtctccatcgcggatgacagtggcttgctgcggggcaggggcaccaaagttgaggtggacgggggtgggggtgggagctgctgcatgtggggaggtaaaggatgaggagagctgggacccatggggagagatggaggccacagatgagggacaggggcctgatggaaggaggctacaggagcagtttggagtctctgggatctggagtggctgggtgctggggaacccacctgtggcacaaggttcttaaagctggcgatgatgttggtgctcttgaattcctggtagtagccaaagcagccggtgacgacaaccacagcaatgagagcgattgccaggtacagctggggacagggaaggggtggggttattcagaggggccggaagctgcctgcctgaggccaccgacctgctccctggtgccctggttttcttggttttccccatgcttttccccacctactaggaagctccatgcaccattccctgtagcctttagccccctcccatgtccctcatgtcccacactcgcctgctctgtcttctcagtgtcttgtgtttctgtgtatatttcatatcctctggccctgaatcctcaatcttccatgtccccatatctgtgacttgtgccccaaatcactgtgtgccttggtctgacgtgttcccttctcctgtgtccccaagccttgcattccccatgtccactgtcccatgtctcctcctgtccccatggcctgtattccccgtgtctccagtttcacatcctgggttttccataatctgctgccaccctctgtgtgtcccctgggcccccttgtccctgcatcctcacatccccgtccctgcgtgtgctgcagaccttgtacgtcatggtctgtgtcctctgtggccacggcccccatgttctagctccccagtcactgtgtcccgtgtctcccatgtctgtgtatctccgagttcccatcctgtgtcccatggccatgacttttcgagcctctgtcccatgtcacatgtccctgagtccccatgtcccttgccctcatctctgccatatgtccaatgtcccttgccctgcacctccatttcctctctgtctctgtgcttctatgtctcatgttttgtgtctctctatgtgctgtgtcctgaggcttgggtccctgccctggtgtcctatgtctgagtcccagggtctcctattccccgtgcctcagtctgtcctgtgtctgcactgcatgtcctctgcttccaagtcccatctcttttttttttttttttttttttttttaagatgcagtctcgctctgtcgcccaggctggagtgcagtggcatggtcttggctcactgcaacatccacctcctgggttcaaatgattctcctgcctcagcctcccaagtaactgggattacaggtgcccgccaccatgtctggctaatttttgtaattttagtagagatggggttttgccatgttggccaggctggtctcgaactcctgacctcaggtgatctgcccgcctcggcctcccaaagtgctgggattacaggcatgggattacacgcccggcctccaaatcccatctcttacgtatcacattgccatactctttatgcccccacctatgtccccatacccaagattcaccccagtgtccctgtgtcctgtgtccttgggtctgccccatccatatcccaatgtccttcaccctccatgacccctgtcttgagactgcctttcgtgttcgtctatccccatccttctctgcccctcttgtcccaagtcccaggctcagtgtcttccatccccaggtccccatgtcctgagcctgtccccacaacatggctcacattgtcgtcggtggtgaggtccccctcactagcctggatggcaaaggcgatgaggcagatggcggcggcaacccacatgaggcactgcaggcccccggccagctgcctcgcgaacttgacgtactctggggtgccccgtggtggccgcagtgcgttgggcccatcccgcagcagcagctcagcagccaggctcgcagagaggccctgggacagaggggcagggcgaggcggtcctgggggctttcctccacatgcacaccccgtggaaagccccctgcttcagtttcccttctccagcttggtctgtcctgctccttctcatctctttgtctcttggttcctgcccccaccccatctctccctccctccttcatctctccctttgtctctctctcctcgctcccctttctatgtgtctctctcctgctgctctctccttatttgtctctgccttctctgtcttgctgtctcttttcagctactcctctctccgtctctgtgtgtcaccctttctctctaatgctttctcccttctctccctctccctctctctccctctctccatctccctccctctctcctcccctccctccatcctttcctctctccctccctccctctttccttttctgcctccctccctctctctatttctccatatcttcctctcttcatctctccctctctctccctctctccatctccctccttccatctccctctccctccctctctcctcctcccctttctgtacgctcccagtctccagctcaccttggtggcactggtctggtatttctgttccagctccgccactgacagctggtggtcgttctgtgtggtggggtggggcagggtgcttgctctgggctctcctggccccctccccgcccactgcctggttcccagcctaccctccagctcccgcccctccccagtcagagctcacaatctccatctccttcttcatgttctccagcttctccttcctcttgccacccccgccacccgccttcttcttcttgctcatcttggcagccatgtccccgccagggccaggacccagctccaccgagtagagctcatagttctcctgggaatggacaggatggagggagggagaactcagattccactgcaacccctgtccccactgcaccccggacccctgggccccactcacggccttccccatggtgcccggtgcctgtgctcccacccaacagagcctgggcccggaccagtcctgatatacccagggagggcggtggggtggagcagaaccgcccgaccacagctgattacaggctccttggggtgacctctaggcctgggcacctcaggcattccctcctgggctggcccccccctcccctgcccagatccccccatgtcaacctgccctgagatcagggagcccctgggaaccgctgcagcaacaagaagagcaaacataaggtgctcattatgcgctgggcattgtgctgacggcttccatgtgctaacttatttaaccttccaataaccctttgaggggacaagaccctttacagatggggaaactgaggcatggaggggttgagtcattctcctatggctccatcacaggctaggacataatggagtgagaaccagatcagctggctgcagagtgtcctctttcagtctaaatagcacgtgcctgatcaactggaagaggagggtgctcccacactctttttttttttctttttttttttgagatggagtgtcactctgacacccaggttggagtgcagtggtgcaatctcagctcgctgcaacctccgcctcccgggttcaagtgattctcctgcctcagcctcttgagtagctgggactacaggcacatgccaccacacccagctaatttttgtacttttagtagagacggggtttcaccagg[137 bp omitted]actctgactattcactatgggctgggtgtgctctgtgtgtcactcaaatggtttccttagcatctaacagcagccctgtaaagcaatattctcttcttagcccccatcagggactttgcagaagatttcaacgtctaagaattagggacagggttccagcccgggcttgaccccagggcttgaccccagagcctagctcttctatggcaccaccaatggaaaaacccaaacttcactgcagcagcaccacacacatgccaggctctgcacgtgtgacctcacgggtctttgcaaaaaaccctgtgcaggcagaactatcattcctgttgtgcagagggggaaactgaggctcacagggactcacatatccagctacagactttacagctctcaaccattccccgtccctaccctagatggggaaaccaaggtgcaacatggggaaaggatgtgtccaagggtcttggcttgatcttggtgttgggtgacagatgccaggaggcctggggactccctcctcatccctcaggtagggacctccatgggcagcagcagcgaggggctgggccagtggaatggtggggaccttggtatgttatggggtgagcgtgtctccaggagcaggtgagcgtgcgcctgataagataactgccctggcaatgtccttctctactggggcaggtcacctgggaaactcaaagctgttgggcagccagagctcctccccgcacccacacggctggtcatccccagcctgctagaagaaacctccaaagaagaggtggcgtggggccacatgctgtccttgtagtgaatctactcgctcactgggctcccatcagctctgagccatgtatgtcaaacagcttgtgtcaccccctgcttacaaccctccaaagccttcccttcccactcagaataaactctgcactccttcctgcaacatctggccctggtcacctgtcctgcctctgttgctgctaggtttccaggggcactgacctctctgctgcactttgcacagaccaaggtcgttcctgcttcaggaccttggtacttacagttccttctgcctgggcccccttccttagatgtctgcactggctttctcacctctttcaggtctcagctcaaatgtcacctcttcagagagtccattctgtaatactgcacactgtgttctgttcctttaccccactgtatttacacctcctactccaacctgacactgtgttttctttttatttgtttggtgttcattagaaggaggactgggccggacactgtgactcacatctgtaatcccagcactctggaaggctgaggtggacggatcatgaggtcaggagttcgagaccagcctggtcaacatggtgaaaccctgtctctactaaaaatacaaaaattagctggatgtggtggtgtgtgcctgtaatcccagctaccagggaggccgaggcaggagaatcacttgaacctgggaggtgaaagttgcagtgagccgagatcatgccactgcactccagcctgggtgacagagtgagactctgtctcaaaaaaaaaaaaaaaaaaaaatagaaaaatagatagataagagatgttagacagatagatggatacataaatgatagatgattgatagattttttttttttttctttttgagacagagtctttctctgtcgcccaggctgtagtgcagtgtcatgatctcggctcactgcaacctctgtctcctggattcaagcaattcttgtgcctcagcctcccaagcagctgggattacaggcacccgccaccatgcccagctaatttctgtatttttagtagagacggggtttcaccatgttggccaggatggtctagaactcctggtctcaagtgatccacccgccttggcctcccaaagtgctgggattacaggtgtgagccaccatgcctggccagaattttttaaatttttggctgaatcatttggaagcaagttggagacaggatcccctttatccatacttaggcatgtgtcttctatgaataaggacattttcttacataagcacagtctaataatcaaattcaggaaattaacattaataaaacactagtaaataatctagagcaagcttgtccaacccatggcctgcaggccatatgtggcccaggactgctttgaatgctgcccaatacaaattcgtagactttcttaaaacattatgagatttgtttgcgattttttttttttttagctcatcagctattgatagtgttaatgtattttatgtgtgacccaggacaattcttcttccaatgtggcccagggaagccaaaagattggacacccatgatttggaggatttatttgaatttccccagttttcccactaatgtccttttcctagtccaggatccagtccgggaccacacctcacattttggcttcctccattgcgtaacaattcctccatctttccttgtctttcatgacctgggcgttttggaagagtatgattcagtgattttgtagacttcgctcagtgtggctttgctgctggttcttcgtgattaagttcgggttgtgtgctggcaggaacacagaagggatgtgtgtcccccccatcccctgccccagagcatcatcgtgtcaggccatgccccattttggagtctgtaacttgtctagagcagggtggacatggtggggaggggtctcaagagccttagggagtgatcaggaaaccattctatgccctctttaatttttactcaagacagtgccacagccagggctggcacccagctgccctggtagttaaagtaattgaaagaaatacagccactgcctgagcccccagcacttcccctaagactccagacctcccacacccaaccccttaaagtggatgcctgtgccagtcccaaggccttgtcctttttttttttttttttttttgagacggagtctggctctgtcacctaggctgaagtgcagtggcacgatcttggcttactgcaacctccacctcctaggttcaagcgattctcctgcctcagcctcccaagtagctgggactacaggcacgtaccaccatgcccagctaatttttgtatttttagtagagatggggttttgccatgttggccaggctggtctccaacttcttacctcaagtaatctgcccacttcagcctcccaaaatgctgggataacaggtgtgagccaccacgcccagccacccttgtccattctgaccatcccctgctcagctaggttcatgggtaaatacttttacctactcccctaattttgcagtcttcagatggtatgcaagttgtgtgtttttgtggggaaggtctttgcttgggtcatttattattttaccgtgtgtctaagcaatactaacccctgtctctgggaggtgaacactgaggccttagtccacaggcaggatctggataagttgggaagtgttccaagtctttggcaccctggaatgcagcctgggtggaccgcacgatgccatttcaggcggatggacaacccctagcacaactcaggggcaaagaaacttctcacaagaatgttgcaagtgtgacatggtccacagtagtgcaagtttctctgagcctggggcacacagaacgttggaaacttttttgagaacaattagtggtcagaattgaaaaaaattttcttttcttgagaaagaggggcagaggacagactattaaatggacggtggtccaggagcagtggctcatacctgtaatcccagcactaggaggctgaggcgggcatatcactggaggtcaggagttcgagaccagcctggccag[136 bp omitted]gggtaaaaccccgtctctactaaaaatacaaaaatcagctgggcatggtggcgcatgcctgtaatcccagctactcaggaggctgaggcagaagaatcgcttgaacctgggaggtggaggttgcagtgagccaagattgcgccattgcactccagcctgggtgacagagtgagactgcatctcaaaaaaaataaaaaataaaaaataaaaaaatttgccaagtgcagtggcgggtgcctgtagtcccagcaactcgggaggctgaggcaggagaacctcttgaatctgggaggcgcaggttgcagtgagccaagattgcaccactgcactccagcctgggcgacagaacaaaactccgtctcaaaaaaaaaaaaaaatgtggatggtgaacattacttgggtttgaaggggaatttgaacaataatgtcctagaattgtagccatacacactcttaggaacccagcgccctgtaaaccttgatgggatcagacccctggctattcctcctccttcccatgttctacttttccctttcatgctttgggatcctgcccgcccaggccttctgcttttccaaaggatcatttcaaaacctcagcacatgcaatttcctctacctgaagtgtgcaccctacctcctccccatgtttaaccactcctcacctttcctgttaagcacagatgatccttcctccgggaagccttggactacccaccaggctgagtcaggcacctccctgggcttccacagacccctggggtccccatcacagcccccacctccctgcctgtgcttcccccatcccagtcctgacgactctgaccctataattcctccatcacagccctgaccactctgggctgtcatgctttggtgacatttcatctccccctccagatccatgagggcaggacccaggatgtctcagtcaccactgtgtgccctgcattgcctggcccaggctggccttggggagtgtttgccaagtgacaggagtcattgtgactgtgactttgggtacagtgtttgcatctccctgataagataatgggcccagcaatgcccttcacctcctgagcaggtcaccccgccccctcgaccctgggaggatgaaagcaaggggctgggcatacagggaccttgcttctcccgcctctccaggccaggtgcaggggcaggtggtcagaattgaaaaaattgtctaggagtcaaggagttggcccccagcccagctaagctggcagccaggcccctgcgttctgtccctctcccatctttgtgcagattggaaaggtcagccatcctgggctgggtgcagagcccttcacttcttcaggaaatttccaggctgtacttgctctgggattttaaaaaatcatattcagggccgggcgcagtggctcacacctgtaatcccagcactttgtgaggccgaggtgggcagatcacctgagatcaggagtttgagaccagcctggccaatatggtgaaaccccgtctctgctaaaaatacaaaaatcagccaggcatggtagcgggcgcctgtaatcccagatactcgggaggctgaggcaggagaatcactggaacctgggaggtggaggtggcagtgagccgagattgtgccactgcactccagcctgggcaacagaatgagactccagctcaaaaaaaaaataaaaataaaaaaaataagggtactggtggagagacttcctccatgggatggggcaagggcagagcgctgatgtccaaatccaagctcaaagattcccaggggagcaaggaggccttgtggttcctagaactgtgaagggtacagggcgattgcaagagggcttctggctcgtgggtctcctgcttctgggctgtctgctgtcacaagaacctgcaggatcattaacaagctcagaacgatggccctgatgctgaagcccaaagctagcctggaatttctctttgtgctgacctcgttttccaaacggctcactatccgtgcctatggagatgaagacaggccgatgggggtgtttttctaagaaggggtgaaattgcagaagggccacctggagtgaaactgaaggccatgatcagggttgggggagggaggattcagcagaggagaggaggaggcaatgcaggaagacagtgcggggatcctgggcacgcccaggtaggagggcatgctgggagaccttgggaagaagtggggttggcagactgtgaacaaagtggggacaagtcccagggcagcaggaagggtgggatggagaaggggttggggctggtatctagagaagaggggaagcttccgaggcatccatggaaaggggtataaggtgggtcaggggatgtttcaccatgggggacagagggtcactctccacccaccaagcaggatggcacaatggcaagtattcctagcaggaagaaacaaaagatgaaaaagatgcagagaggcaggcagtcattcacaggaacacttaaaggcattttgtagatggtcatctccatgactttgacctctgggctccggaggtcagtcacacaggcatgaaccctggtggagggaggggcagggtctgcagaaggactgagaaggatcagcagatgcgaaggaatggggaccaacagaatcaatcccatcaacaggaatgtgctgggaacactcaacccacagtgaacttggcctttgttgtgggaaaagaaccctgcaatgcccccactgacctctatgatacccttgctagccctcaaagtatcctgttggctgctttttttttttttttttttgagatggagtctcactctgtcacccaggctggagtgcagcggtgtgatctcagctcacaacaacctccacctcctaggttgggatcctcccacctcagcttcttgagtagctgggattacaagcatgcaccaccatgcccagctaatttttgtatttttaatagaggcagggtttcaccatgttggctaggctggtctcaaactcctgacctcaagtaaatcacccaccttggtctcccaaagtactgggattacaggcatgagccaccgtgcccaacccctgttgtcttcttctgtctccctaaacccatccctgttctccaggaagcactacctcttggtttgccagtgcttccagttaggtctggtcctagcaagttattctgaactcccctttcagtctaaaaaatgctcagtttgaattttaaatccagtcactcattgctttaatccagtcactcaatggggataagttctgagaaatccagtcactcaatggggataagttctgagaaatgcattgttaggtgatgtcatcattgtttgaacatcatagcttgtactcacacaaacctaaatggagagcctactgcacacctaggctatatgggatagccttttgctcctaggctacaaacctgcacagcaccttactgtattgaatactgtaggcaacttataacacaatggtaagtatttgtgtatctaaacatatctgaacatagaaaagatacagtaaaagtacagtataaaagataaaagtggtatacatctgatatgatttgctgtgtccccacccaaatctcatcttgaattgtacctcatctgcctgaatcagtgctgaaccactgaggcttaaaacagtgcctggcactgttacccaataaatgttcattgaatatatgagagtcccatggtatctggcaacgtggacacacaggagatgtgaacatgtgggcacacatacgtgcatgcaacagatgaatcagaaagtggaaacctcctcataaactttactgctcttaaaaatgctgatggatgaaggggtgggttacagattaatagcatctcaaggcagaagaatttttcttagtacagaacaaaatggagtctcctgtgtctacttctttctacacagacacagtaacaatctgatctctctttcttttccccatatttcccccttttcttttcaacaaaaccgccatcgtcatcatggctctttctcgatggtcgctgtctcttcggagctgttgggtacccctgcagactaacaacagacagaacaggcacacaaggattaatatgaaatttataattatagtacttccgatggtcttaacccaagtgacagggttaagatttacgaggccatcagcaactcctgcaattgcctcagttcctggcaccaaatttaaatgggcttttgatgttttggaaatttgttcttttaatttggaaatgtctaaagtgagattatcttctcttccctgtagatggcgtctaaccatgtcccagtgatgctcagactcattataaacttggggtgtaatacaaaaatctgacgtattccagtcacactgtaactggaaacgatgttctaagctcatgagcctgtctcccatccaaatgacagtttgtctaagatcattaatttggtttgccaatttttgatcaatactagattgtgaattccacaatcttgtagaacttttttgccaatcattaacaaagtttactgactgaacagaagagtgcaatgcaactcctgccacagcagccatagctgtgactgcaattaatcccataatcactgtaattaaagtaaaaatgaatcttttggatctatttaaaacgccttttaatacttcagtcaaaatatgaacggatggtgaggcctcccacagtcggtccatggacacaaggatccacacgccttcccttgctctcaccagcagaatacggtgttgccaattaaaagttgaatcaatgcaagtaaacaatctgcagttttcacaggttatagtttgagagtctggtttaataactatatttcctataactagcatataaagggactttacacagctttgtaaaggaactgttagactggaatttaggtcgatagtataaaatggcttatgatctcgtttctaaagtttgatttccagaccaaattctaatgtagtatgaggctacactaagcctccaccattctggatgttcaggaccagaaacaggacttattatttttggtcatggggtagagattcctttttctccccatttccaagggtagaaagactgtaattttttatgcttatgttcgtctaaactttctatgaagtcgctatcaacagttggactcacttgtgcactgggacacgactgagtttgtcctgtgcaattgtggtagaattgacctcgaggtgcccaatctataatagttcggaattcactgttttgtaatatcactgcactattggccacacattcttcccaaactaaagcttctacattttttgatcctttggaaatttcctcggggcaaggtttccctttaggtctaaattttaatgatctttgataagaaaagtcttgtaaataatttacctgtggcctgagcgacatcccgcttaccatgtgataagtgaatcttctgatgggactgacagtaggtacttctaccaaccaattttggactgcaggcattaaacatcctggtgctctccccaggcaaataggaggataatgatacccaatgaaaatatttatcatcatcccttcttcctcaggtttggcagggcaacgatcatctgttggaccaggtacccatacactatcattaacatatacttccataggattatccatccatgtgactgcctgaattaagggcgggaaaggcacataggcccagtaattataattagctgcagctgctcctgcaggcatagggagacttaccaccattgatacaatcatcaaagctgcaagcagcatactctctggagtttgtgtcacctttgtgttctctagatattttgtagctaactgtgtcagcttctttaattgtgcccaagtcagcagctctgccttcttggtggatggcaacttcatctgttcttctgacatcaccattctgttcatcttctgagtcgatggttctcgatgacggtgctcgattgcggtgtctccgtctccgtggaggtgcttttctttgcatctctgatgggttcattgtagaacttcaaatgtctagtgggtatccaaacaggacgctgattttctcctggtgaaacgcaagcaaaacctctcccccacgttaccaccttccatatttcccatgtcttatttttattatctttccaccaaatcagttttccttcatgtgggctgttctttttaccagtaagatgttctgcagaagtagtagtctgatttctataaatgtttaaaaaatttaaagtatagagtgctagactaagttgcatctgaggagtggtacactccttactgtctcccccttctttttgtttaactaattgagttttgagtgttctattagttctttcaactatggcctgtccttgggaattatagggaattcctgttgtatgtgtaattttcttggaaagctttactacagtatcctggtccattgttagttttgattttttctggaactcccattacagcaaaacaagataataaatgttttttaacataagaagtactttctcctgtctggcaagttgcccatatgaaatgtgaataagtatcaactgttacatgaacatatgataatcttccgaatgaaggtacatgtgtgacatccatttgccataacacattaggacacagacctctgggattaactcctgcctcttgagtgggcaggtgtaggacttgacactgggtgcaatgtggtacagtatcttttgcctgtttccatgtgacatcaaatttgttttttaatcctgctgcatttacatgagttaaagcatgaagttcttgtgcttttatgaatgcagatgataccagtaagtcagcttgttaatttgctttagtcaaaggccctagtaaattagtgtgtgctcgaatatgagtaacataaaatgggaaatttctttttcttacagtttgttgtaataaattgaatagctggtttaactgatcatccatgctatatttgattagagctgtctcaacatcccttgtagcctgtactacatatgcagaatctgatacaatattgataggttgatcaaaatcttgtaacactgtaatgactgcaaccaactctgctctttgagtcaattgatattgagttttgattactcgctcatcagaccccagaaaaggtgttggttgatatagacagcaggacggtggccatggaagtcagaatccactaaggagtgtgtaacaactcacctgccgaatcaactagccctgaaaatggatggcactggagcatcaggcccatacccggccatcgccagcagtcaatggaatgtgagtgccttagaggtcttggggccgaaacgatctcaacctattctcaaactttaaatgggcaagaagcccagctagctcagtcggtagagcataagactcttaatctcagggttgtggattcgtgccccatgctgggtgccagatgaagaggtgagttgcccctaaaaaggataccctattccttctctttcttaatttcttttagtctcaattgggactttaatgccattttcattttttcctagtccctttcctggtatatatcccatctcagtcatgattttttgatttgcggggctgtataatggagcaggcatagtgatttccgcaccccgttgttgtaataaatctcgaccccacagattaagaggaatcgaagtagtcattggctgaacagtactttcttgattatctgaccctaaacaatgtaaaatcttagtactttgatacacttctgaggctgtgcctacgccgataagtcctataacagcctttgtttaggccaattttttggccactgattgaaagcaatgatagagacatctgctccagtgtctactaacccttcaaactgttttccttgaataatggccttacacacaggtctgttttctgagacctgacttgcccaatatgcagcctttcctgtcggatcagtgcttccaaactctcctattctttttattttactatttccaatcttaatataaggcaggagtaataactgagcaatcctgtctcctggacaggaggggggacttcctccaacacaggcagtcactgatgtcctagttcaaatgctccagggggaacagtccattactcactgagggaggcaggctttcctattttctgtttcaagcttttgatcacaatggagcaaatgatcacaatgcagcccaccaggatgctggtgatgctgaatccaaaaagtagtctggaattgatctgtgcttttctctgattcccaaggaagttggcttcctgggtctgtgggggtaaaggcaagctggtgtgaatgtttccaagatggggagggggaagaaaatccctggggagaggtgaagagggcaagatcaggatgatggcatgatggaggtcagggcagggctcagtctcccagaggaaaaaggaagaaaccagggagccaggatgagggagtagatctaggcagaatacagagggaggagcagagaggtggccctggagaggtgcaagggcaagcagatggtgaagagggaggaggcaaatccccgagaaacacgaagaggtccctggggagaagcagggcatcggcaggaaagagaaagaagatctggggacaaagagagttggtagctgggtggtgcccatcctgagggagaacaccagagcggggattgccagcaggacgcagaagaaggatacgacagcgagcagtaaatagtctctttctggaggacacaagggcatcagggtgactggttgcattggggcgagcagctgcactgggatgaagggctgcatggggatgagtggctgcatcggggtgaccagggacttcaagtccctggggctcattgcagtagccataggccttggcctgaggaggagatgctgggtgagtggaatctgcagacaggggtcatggggtccgggaaggggacatctgagtccccaagcaactgagaccacccaaaccaacccctctggctagaaaggtactgaaagttgacactgtcccaagccaggggacagcgctccaagccagaacccaccacagccccgtgctcctgtagagtagccttgctggctctggaacacccacgccaccctcctctagcctctcacaaccccctccctgctcccctctggctgttgcactttcctcctctaaactctccctacccctccttgccccgcaaactcacacacccccactgttttctcagcctcccaaagtgctggaattacaggcgtgagccactgtgcccggcctatttatttattttttgtagaggtctcactatgttgcccagtctggtcttgaactcctggcctcaagcaatcctcctgcctcggcctcccaaaatgttgggattacaggcgtgaatcactgtgcccagccactcttcctttttgttgttgttgccagtttgaacgcctgatgggttcaatatatagtgtgtggatctcacatccagattgaatataagtataatgggcagatttatcactattaggaggctactgtacattaggcccaggctggcccctgagggccacatggtaactaaggcagacaagaccataactcagatagaataatagtctccaatcccatccaggttgctgtgaatgccattaattcattccttttcatggctgagtagtattccaccatatatatatgtaaaatcagtttctttatccactcattcattgatgggcatctgggttggctccacatttttgcaattgcaaattgtgctgctataaacatgtgtgtacaagtatctttttcacataatgacttcttttcctttgagtagatacccagtagtgggattgctggatcaaatggtagttctacttttagttctttaaggaatctccacactgttttccatagttatactagtttacattcccaccagcaatcagggaaatgcaaatcaaaaccacaatgcgataccaccttattcctgcaagaatggccataatcaaaaactcaaaaaataatagatattggcatggatggagtgaacagggaacactttccttgagttttaactccagactggctcctttgctgtttttctggtggggctcttaccacatttcccacagccattggctgtgtgctcctgcatacttggatgctcctctcctgcctgggccccaccaggacccctgagatccaggagccgtggcttttgggggctggtagagaagaaacagggagctacgtgaaggccaatggcagaaaccaagagagtttcaagaaagcaagaaagagaaaccagctctgaaaatagcaaaaggaacaacgggaaaaaataaaatagtttcatgtaacctaaaaacagacattgagtcttcgaatcaaattgaaagcacttgctagcgtcagaggcatgtgaaccagagcaactccatcttgaatggggctgagtaaaatgaggctgacgtctactgggctgcattcccagacagctaaggcattctaagtcacacgatgagataggaggttggcacaaaatacagatcataaagactttgctgataaaacaggttacagtaaagaagccagctaaaacccaccaaaaacaaaaagtggcgatgagagtaacctgtggtcatccccactgctcattatacactaattagaatgcattagcatgctaagagacactcccaccagcgccatggcagcttacaaatgccatggcaaca[133 bp omitted]gcctgggcaacatggtgaaaccctgtctctactaaaaacaggaaaaattaactgggcatggtggcacgcacctgtaatcccagctactcgggaggctgaggcaggagaatctcttaaacccgggaagcagaggttgcagtgagccaagattgtgccactgcactccagcctaggcaacagagcgagactccatctcgaaaatttaaaaataaataaataaataaaggggaatatcacaagcaacgtatggcaacaaattagacagcttagatgacagctaaaaattcttagatgaattaccaaaaccaactcaagaagaaatagaaaatctgaatagatgtataacaaataaaaagagatttgtaatttaaaatactcccgcaaagaaaagctcaggcctagatggtttcattggtgaatttcacaaaacattaaagcataaataatattaattctctacaatctgttccaaaatatggagaaagggagcactttcccagcttattatatgaggtcagtattaccctaatatcaaagccagacagtggcatctcaagacaactagagaccaatctctttcataaatatgatataaaagtcattggtaaaatatcagtaagcccaatacagcaatatataaaaagggttatacaccatgatcaagtgggatttaccccagaaatgcaagattggtttaacttctgaaaatcaattaatgtaacacaccatagtaaaagaataaattttattcatttattttaaagatggggtctcactctgtcacccaggtgagattgcagctcactgcagcctcaaactcctgggctcaagcaatcctcctgccttggcctcccagagtgttgggattacagatgtgagccgttgcacctgcccctgtaaaagaagacactttttttttttttgagatgg[140 bp omitted]cggtgaaaccccgtctctactaaaaaatacaaaaaaatcagccaggcgtggtggcgggtgcctgtagtcccagctactcgggaggctgaggcaggagaatggcatgaacccaggaggtggagcttgcagtgagccgagatcatgccactgcactccagcctgggcgacagagcaagactctgtctcaaaaaaaataaataaataaaagaaaagaaagactaaattcttcctggctaagatagggaacaaaacaagaatgttcattctcaccacttttattcaacagtatagtggaggtcctagccagtacaattagtcaataaaaagaaataaaaggcatctgggttggaaaggaagaagaaaaaactgttttgacccacagttgacttaaatttgcttgtagaaaactctaatgaatccacaaataactactagaagaaatgagtccagcaatgctgcacaagatcaatatccaaaaatcaattgtatgtcaataagctaccaatgaacaatcaaaaaatgaaattaataaaatgaattcattcccaataggatcaaaaagaataataaattcaggctgggcgtggtgacttatgcctgtaatcccagcactttgttaggccgaggcgggcagatcatctgaagtcaggacttcaagacgagtttgggcaacatggtgaaaccctgtctctactaaaaaaaaatacaaaaatcagctgggcatggtggcgggtgcctgtaatcctagctacttgggaggctgaggcaggagaattgcttgaacctgggaagtgaaggttgcagtgagccacgatcgcaccactgcactccagcttgggtaacagagagaggctatctcaaaaaaaaaaaaagaagaaattcaattaaaaaaagtaataaatttaacaaaaatacaagagttgtacaataaaaactataaatcttggctggcggcgtgatggctcacgcctgtaatcctagcactttgggaggccgaggtgggcggatcatgaggtcaggagatcgagaccatcctggctaacacggtgaaaccccgtctctactaaaaatacaaaaaaattagccgggcgtagtggcaggcgcctgtagtcccagctactcgggaggctgaggcaggagaatggcatgaacctgggaggcggagcttgcagtgagccgagatcacgccgctgcactccagcctgggcaatagagtgagactctgcctcaaaaaaacaaacaaacaagcaaacaaacaaactataaatcattcctttaaaaatttaaagatctaaataaatggagtggcatcccatgttcatggtttggaaaactcaatgttagcaaaatggcagtactcccctaattgacctaaagagtcaatgcaatctttatcgaaacctcaactggcttgtttttttttttttgcagaatttgacaagttgatcctaaaagtcatgtggaaatgaaaaggatgcagaataacctagcaatgttgaaaaagtaaaataaagttggaggacttccagttaccaatttcaaaatttattcctgattacaaagctataggaataaagacagtgtggtactggcataaggatggacgtatagctcaatgaagcaaaattgaaagtccagaaataactttcatatttatggtcaagtgatttttgacaaaagtggcaaaaccattcaatgtgaaaaggagatccaacaaatggtgctagaacaattggatctctctctctctctctttttttttttttttctttttggagatggagcctcgctctgtcacccaggctggagtgcagtggcatgatctcagctcactgcaacctctgcctcccgggctcaagcaattctcctgcctcagcatcccaagtagcttggggctacaggtaaccaccaccaagcccagctaatttttgtatttttagtagagacaggtttcaccatgttggccaggccaatcttgaactcctggccattattttcaaatgattctcacatgctctgaaccccactcattcatcattattatctctttttttttcttgagacaaggtctccctcttgtccaggctggagtagaggggtgcgaccatggctcaccacagcctcaaattcctgagcaaaagcaaacctcccatcacaccctcccaagcagctgagaatacagaagcctgccctcagagcctgatatatatatatatctgtctaaaatatatacattttttttctagatacatggtcccactgtattgatcgggctaggtttcactatcctggtctcatgtgatcctctccccttagccattatcaccttatagagtgcacattttgttccatgcactgttcaataccacttacatacattaatttaatcctcacaatgaaacaagagagaaataattattattctcattttaaagatgagaaaactggtacacagagaggttgcacaaggtgatattgctagttagtggcatggtggggatccaaacctaggtagtctagttccaaggtgtgtttattcagcccatgtttactgagcacctactactatgtgttgggctctgctctaggtgttagagctatagacagtataaaagaactacctcgcccccattaagacatctctcctggctgggcatggtggctcattcctgtaatcctagcactttgggaggccaaggtgggtggatcacttgaggtcaggagttcaacaccagcctggccaacgtggtgaaaccccatatctactaaaaatacaaaaataagccaagcatggtggtgggcacctgtaatcccagctactcgggaggctcaggcaggaaaatcacttagaacccaggaggtggaggtttcagtgagccaaggttgcaccattgcactccgccctgggcaacaagagcaaaactccatctcaagaaaaaaaaaaaaaaaagacatctctcccatatctctctcttattgagacatggtctctctcacctttcccaccaaaaattttttttaaaaaaacaaaaccctttcatcactcagccccctcaagttatggatctggtttttggtttttaattccagagacaaaaaagggggcagaacatagacccatgctaccatcttgacagagtctccatttcagttccatacgctcaagtccctcctatctttaaaacaaacaagcaaaatcatcattctcacccttttgcatctaccctagtcctgcctttcctggctcttcataggcaaacttttttttttttgaaacggagtctcactctgtcacccaggctggagtgcagtgacacaatcttggttcactgcaaactccacctcccgggttcaagcaattttctgcctcagcttcccaagtagctgggattacaggcacccaccaccacatctggctaaattttgtatttttagtagagacagggtttcaccatcttggccaggcttgtcttgaactcctgacctcgtgatccacccaccttggcctcccaaagtgctgggattacaggcatgagccactgcacccagccataggcaaaattcttgaagcaaatgtatacactgtctccaattccacacctcacactcaatccatggctctctgaaaccaggtgttggcttacaacattccagaaactggaacccatgttcttctcagctgtggcactgctctccttactctttcgcctccaagctcttggaagaaatgtctacattgtctatactacccctttcttgctcactgcctggatccctgcaatatggccactgcttctgctgatcctctgatactgcccttaccaaaggagctaattcattcccgccttcagagctggagtacatgtctcagggcttgacacacttgtccatgtacttgtttctaagcctgtcttagtttgtttgttccactatccaagggacttgccagcaaccaatacacatgcttcatctcacccaaccttcacttctgtcttcccccacctcggcgccccatgttctgttgtcctggaacatccacttggtcctttgaaaggctctgaatcaatttcctccatgaagaatatcctgacttctggattgcatgtgttgtcactgttcttctaactacttctaggtccaggactggtcttaaatacccaggttgtgtcttggactagccatactaaggtctacatttgtggactgcacagtgtcacctcccacccacccccaacttcctgaaaagtggctcctcaaaccctctactcccctagaaccaccagctaaaggaagcatcagctaaaaccccacagtattagcattcattaaaagctcctacctgaatcagcaattactatggtatttgaaaatgttctctaatggtgcataacaaattccccacaggtattaactcacagttctgtaggtcagaatggctgcttctctgctcagaatctaccaaagctaaaattaaggtgtcagctgggctgggttctcatgtggagctcaggatcctcttccaaatgaatgtgattacagcaggattcacatccttgctgttgcagtactaaggaccccgtttccttgctggctgtcagctgggagccattctcagccagaggctgcctggattcctccctacgtggccctggtgacatcttcatgccagcaatggagacctttgcttgcctccaatcctctcacacctgaaacctcttttgccaggaagactcagtccttttcaagaactcacctcattaggtgaggcccccagaggatattcttcctaacttaaagttaactgatttcagaccctacctacgtctgcaagacgccttcccagcagcatacagactagtacttgactgagtgactggagaaggagtgtgtacaccagggagcaggaatcttcgggtcatctcagagttctgcctaccacattggggatttcctgttccatcgttccattaggttgtgttctactttaagaaagatcttcccccttttccccttctttctctattctttccttttttctttctgtcagcataaaccaaggaattcttttttttttttttttttgtcattttttcttgagatggagtctcactctgtcacccaggctggagtgtgcagtgtgatctcgaatcactgcaacctccgcctcccgggttcaaacgattctcctgcctcatcctccctagtagctgggattacgggcgcctgccaccacacccggttaatttttgtatttttagtagagacggggtttcaccacgttggtcaggctagtctcgaactcctgatcgcaggtaatccgcccgctttggcctcccaaagtgttgggattacaggcatgagccactgcgcccagccggaattcatttttaattcaagactttacaatccacttctgacactactcattttcctcccctcagtaaatctcttactcttactgggcgtgtctagtttctctcttccacaactcctgggagaccctcctgacatcgcccatccgcgcaggctgcagagagagatcagtgggaggaggaggagccgagagccaccacttaggcttccaaccaatccctaccagggtgggcggagcccacttcctgattggctgcactctctgtgtcttggggtgggcgagaacggcggggccacgccccctaactaggcagccaatcaggacgtggggtgctggtttctccattgcgaagcttcagcctttgatggtttgggtcctgggagtctggttagtacaaggggaagcctagtgggtctggcgctccgttttcaagacactcggagtccgtctttgaggggaaaggtcatggccctgaaaccaccttctgccacccagcctgctcccaacgcgccagctaccccagacgccccccctaccacaggtgatccaggtgcttcagctgccccaggttctcccactaccacaggtggtccaggtgccccagctgaggtgccccaggagccgcaagagcctacacagacaccagaggaactagcattttacgccccaaactacctatgtttgaccatctttgctatacttttattccctccatttggattggcagctttgtacttctcttatgaggtaaaataatgcccaagtcatagcccccgtccttttttttttttttttttctttttgagacccagtctcactctgtcccccaggctggagtgcagtggtgcaatctcggctcactgcaatctctgccttcccggttccagcaattctcctgcctcagcctcctgagtagctgggattacagacatgagccacagtgcccggctcatttttgtatttttagtagagacggggtttcaccatgctggccaggctggtctcgagcttctgaccttgtgatccacccgccttggcctcccaaagtgctggcattacaggcgtgagccactgcacccagcctaccctgtcctccatttggcccctgcatctgctcctatcctgggacctgcataggggctttccctcagtgactgcaggtctccaaccgttctccccagggttcctggacacagaaacccacatctatgcttccacccctacagactatgaaggccaaccagaacagtgaatgggaagaggcttacatcaactcaggccgaactggttggttcggtgcattcgtggtaatgattggcttaggcatcatttatggcttggtcctatattaatgaagtctaggcatagcaacccaggggtccgctccccaaccgagccactcaccaaacactaaccagccaagtcagccatcaggcaagaaattcaaccgctgagacatctagccaagaaatcctctaaccaaggaactcaacattcaagaaacccaccaacccaggaacacacagaccacctgcctgtgctacttcaactcactcagctccagagctgtcttcgttcaccctaggggtccacacttcatgccctagatccctttagctccttgacactgggctgttctttcagaggaattttaaaccaaaaaactggaatggaatgttctggtttcctgtggtgtgtgtgtatgtgtgtgtgtcaacatgcccatgattgttttctgggtcagtggtcagtatctgtgtttccctggagctgtttcctagactgtgaaaatcagaatgtcccaatggggaagcccacagacatagaattcaggcagatgtcagttaaaaacttacctctgacactgaaaaactgtatagccctgaacagatacttttcttgagcatagttcctttgtctctaaagcaggcataattgccaatgtggggatgatatttagaaatctgaactgatgtttattctctaggggtcttctcatttgagctgggattggagatgtctagtgtctcagagcagcaataagaaaacagaaacctcttccagcttctgacatccaaatgtcaagctcttaggagaagaatggaaagtcctcaagaaatgcaaatagctttggcagaatagctgatgaagaccacctctcccccctccagaaaggcattggttccccattcatggaaaagggaatgtagagagagattagacaatagtacatccataaggttcctggaatctgcatctgaggaagaggggcgtcagagaccccagctgttatctataatccctcctcacagataaggcctagagaggctccaagttctcaaagaagatatgctacatggtgtagacatttacaaagaaatgacctcagacagccaaggaggataccccatggcccagcctagtgagaagaaggtgggttccataggaatcccaagtgccaggtggagacagaactgtagaggaaaactagggataagcagggagccatcgtgcatgaatcaaaacagagatctagactgacaccatgggccacagacaccccggggctgcctctgatgcccaagcttcatggacaaccccaagttcagaaccagatgaatatttagcacaatatttagcagaactaagtttccaccaccatggagaatggggattctcagtagaaagtcaatggagctgctgggcaagagactgctcactgtcccccagagcccatcgcctctttgttctgggaacattgcctggccacgtctcagaggttcccctctgcagccatgaaatgtgctttggtcctgtggaatgtgagcagaactgacatgtaccacaaacaaacctggcttttcaatgtctcctgggacactcctctaaactcctcctcccccggccaacggggcaagggatacccatgtgatgatttagaaggccacatgttgtagacgtggcaaagcccccattagcctgggtccctgaaccattctaggaacagcctcccttcccccaactgcctcatgtggtcaagcagaaaatagactaccatgttgacaaatgacatgcttggcctgtttccacagcccaatccacccaaaccagtgcagatgcaggagaatagagttctatttcttgcacatctgggattacagcttcaagttcatacccaacagagacatccatcttgttgggtggtctataggaaataataatagaaggaaacaacaaaggccctagtccaccttaattgtaattgttgtgatgctgagtttgtctcctctgtgggcttgggtgtctgggcagatctcatgtgtttgtgggacaatgctctgggttatggggatgcctgcagataggatgatgcctaattgtctgtcatgttagcagatctagagggttagccatccctgtccctctccagatccagcccaggctgggcctgtcacattcagctgcaaagccatgtcaggttaggatggtccatgtcaacatcagcaggcagacccaagtgtcaccttctgctacaggccttggaaagccagccagcctcctccacttcagctcccagacttcatccaacctgaatttcactctcgggtatccaactggtatttagcaccaggtaaacacaaaacgaggccaggcacagtggctcgtgcctgtaatttcaatgctttgggaggctgagagaggaggatggcttgagcccaggactttgagaccagcctaggcagcaagtcgatagataactcttttctacaaaatttttcaaaattagccaggcgtggtggcacacgcctgtagtctcagttactcaggagggtgaggtgagaggatcactttagcccaggattttgaggctgcagtaagtcatagtgatactactgcacttcagcctgggggacacagctagactttgtctccaaaataaataaatgtaaaaaataaggccgggtgcagtggctcacacctgtaatcctagcactttgggagactgaggtgggaggatcacctgaggccaggagttcgagaccagcctggccaacatagtgaaaccctgtctctataaaaatacaaaaattagccactgtggtggtgcgtgcctgtaatcccagctactcgggaggctgaggcaggataatctcttgaacccgggggtggaggttgcagtgagcagagattgcaccacttcactccagcctgggcgaaggagtgagactcaacctcaaaaaaaaaaaaatcttatctgactttgattgcattacaatcaatttagttatcagttttgggagatttagcatctttatgataagccttcctattcataaatatgatatatcaaataggacttgtacatctttagctttattttatgtattataagcaatccttttttccattacataatctaaattattattggggtagaagaaaggtattgagtttccaatgttgatatcttgtgtggcaaacttactgaactttcttggtgtaataattcatcattttacacacttacattgtctatgctaaatttgaattatttcttaacaattttaatacctcattatatatgtatttttttagttcctgggctaaacctttcagcaaaatatgaattagcatcataatcttgtttccatccttgtatgggttagttctattgttttactattaagtcaggcagttgatgtagatttctgataaaaatttcatcttttttttttttttttctgaagcaaactctggctctgtcacccaggttggagtgcagcggcacaatctcagctcactgcaatctccgcctcccaggttcaagcgattctagtgcctcagcctctatagtagctgggaccacaggcacgcaccaccactcggggctaattttttgtatttttagtagagatgggatttctctatgttggccaggctggtcttgaacccctggccttaaattatctgcctgcctcagcctctcaaagtggtgaaattacatgcatgagccaccgtgaccagccaaaatttcatcaattttgttatgttttcttctattcctggcttgccaagattttttaaattagaattttatattgaggctaggcacagtggctcatgcctgtaattccagtactttgggaggccaaggaaggagagtcatttgaggccaggaatttgagaccagcctgggcaacatagctagatctcgtctctactgaaaaaagaaaaaaaaattagctaggcatggtacctgtattctcagctactcaggaggctgagatgggaggataacttgaacccaggagttagaggcagcagtgagccatgatcacacccttgtactccagcctgggcaacacagcgagaccctgtctcaaaaaaaatttgtgttgaatcatattaaatacttttcagcatctattaacatgatcatacgagattttaattcaatcctttaacaaagttattcacaatgaaccattcttatactcttgggaaaaccttactgggtcacaatctattattctttttttttttttttagagacagagtcttgctctgtcgcccagactggagtgcagtggcacgatcttggctcactgtaagctccgcctcccaggttcacgccattctcctgcctcagcctcccgagtagctgggactacaggcgcccaccaccacacccggctaattttttgtatttttagcagagacggggtttcatcgtgttagccagatggtcttgatctcctgacctcgtgatccgcccgcctcagcctcccaaagtgctgggattataggcgtgagccaccatgcccggcctctattattcttttaatatgtgatggatatggtttgcttatgccttatttgggtcctacatagttttcatctgggggctgttctcagtcctttgcattggggcagtgctggcaatgcagaatgggttgagaagcattcaatgtgtttctgtgttctggaaacatttctatgtcatgggaattagctgcttcttaaagattggagtgggccggacatggtgcctcatgcctgtaatcctagtactttgggaggctgaggcgggtggatcacctgaggtcaggagttcgagaccagcctggccaatatggtgaaacccccatctctactaataatacaaaaattagctgggcatggtggcacacaactgtaatcccagctgctcgggaggctgaggcaggagaatcacttgaacccgggaagcggaggttgcagtaagccaagatcacgccattgcactgcagcctgggtgacaagagcgaaactccatctccaaaaaaaaaaaaaaaagttggagtgaacatgcctgcaaaatcttctgggcctgtaatctttttcgtgtagcagattttgagtactttgtcttcactatgatggtgaaagcagcaactctcggagtcaagtacaagccactgttatgagcagcttcggagtattgattcttttggtctccacactaaccctatagcctgcattcttacagactgaggataaagcacagggagctggaaagacacagtgcaggtctcacagcgaattcactgaggggccaggattgggaaccaggaaatctgccaccaaaagccgtgttcttaagcactaggtggacaacactgcctcccatcgaccgttagtagcaattcaatctttttacctgctggagtcacttgttaatcacttacctttctcttaacaaatcatttttattttcgacatagaagctaacttgaaggagcgcccactggcccagagtggtacaacttaaacatcaaaaatattaataacggccaggcgcggtggctcactcctgtaatcccaggactttgggaggctgaggcaggtaaatcaattgaggtcaggagttcgagaccagcccggccaacatggtgaaacctcgtctctactaaaaatataaaaattagccagccgtggtgacagtcacctgtaatcccagctactcgggaggctgatgcaggagaatcgcttagagctcgggagtcggaggttgtagtgagccgagatggcgccattgcactccagcctgggcaacaagagcaaaactccgtctcaaataataataataataataatagtaataacaataatagatttaaacacaccaaatatatatcatatttaatgatgaaggatggaatactttccctataagatcaacaacaaggaaaggatgtctgctcttgacactcctatttgacatagtgctggaagttctagtcactgcaagaaaaaaacgcaaacagggcccggcgcagtggctgacgtctgtaatcctaacactttgggaggcaggaggatcacttgagactaggatgtcaagaccagcctaggcaacacagcatgaccccatctctacaaaaaatattaaaaaattagccaagcatggtggcacatgcctgtagtcctacctgctcagggggctgaggcagggagatcacttgagcccaggactttgagactgcagtgagctatgatcacaccaacactgcactccagcctgaggaatagagtgagactctgtctcaaaaaagaaaaaaaggcatttagattggaaaggaagaaataaaactgtatctgcaggtgacatgagatatgtgtgtgtgtgtgtgtctgtgtgtgtagttga[136 bp omitted]agctggagtgcagtggtgtggtctcggctcactgccagctccgcctcccgggttcacgccattctcctgtctcagcctcccgagtagccgggactacaggcacccgccaccacgcccagctaaatttttgtatttttagtagagacggggtttcaccttgttagccaggatgggctcgatctcctgacctcgggatctgccctcctcaacctcccaaagtgctgggattacaggcatgagccaccgtgcctggcgtttttcttttcgttttttttttttcttttttttttttttttggagatagagtctcactctgtcacccaggctggagtgcagtggtgtgatcttggctcactgcaacttccacctcctgggttcaagcgattctcctgcctcagtctccctagtagctgggattacaggcgcccaccaccatgcccagctaatttttgtatttttagtagagacggggtctcaccatgttggccaggctggtcttgaactcctgaccttaggtgatccacctacctcagcctctcaaagtgctgggattacaggcgtgagccacagccctggacggatgtattttcaatacatgtctttataatgcatgtgaaagctaacgcatacatgggagacaatgaagggaccaatatggtggaagttttccatattccacttgaagttgcaaaatattcaatctaggtagactatagaatgtttaagtgtgtttaccataatccgtagagcaatcacttaaaacttgcaaagatatatagtgaaaatcacaataaataaattaaaatggagtactaaaatagtatttgaataatccaaaagaaagaaggaaaagggaaaacaaggaacaaaacacagaaaagtggaaataaaaaacaaataatagtagacctaaagcaaaacataccaataatcatatttaaggcacatgatctaaacacacaagttataaaatattttcataatgcacttaaaaaaaaaatagccagagccgggcgcgttggctcacacctgtaatcccagcactttgggaggccaaggcaggcagatcacgaggtcaggagaccatcgtggccaacaaggtgaaaccctgtctctactaaaaatacaaaaattagctgggcgtggtggcggatgcctgcaatcccagctactagggaggctgaggcaggagaatcgcttgaaccagggagtcagaggttgcagtgagccgagatcgcaccactgcactccagcctggcgacagagggagactccatctcaaaaaaaaaaaatagccaggttcaaaggctcatgcctgtaatatcagcacttcgggaagccgaggtgggtggatcacttgagcccaggagtttgagatcagcctggaaaacatggtgaaactccgtctctactaaaaatacaaagaagttagctgggtgtggtggcacacgcctatagtcccagctacttgggagactgaggcaggaggataacctgagcccaggaagtcgaggctgcagtgagccatcatcacatcactgcactccagcctgggtgacagagtgaggccctgtctcaaataaatacatacataaataacttgagcccaggagttcaagatcagcctgggcaacatagtgagaccccatctctgcaaaaaatttcaaaattaacctggcatggtggcttgcacctgtagccccagctactcagaagtttggggcaggaggttgtttgagcccaggaggtcaaggctgcagtgagccgtgttcacaccactacactccagactagcaacagaacaaaaccttgtcttaaaaaaaatagaagtaggccaggcgcggtggctcactcctgcaatcccagcattttgggaggccaagatgggctgatcacctgaggtcaggagttcgagaccagcctcactaacatggtgaaacccagtctctactaagcatacaaaaattagccaggcatagtggcaggtgcctgtaatcccagctacttgggaggctgaggcaggagaatcacttgaatgcaggaggcggaggttgcagtgagccgagatcacgccattgcactccagcctgaacaacagagtgagactctgtctcaaaaaataaaaaaattaaaaacttaaaaaatagaagtaggccgggcgtaatgcctgtaatcctagaactttaggaggccaaggcaggcggatcacttaaggtcaggcgttcgagaccagcctagtcaacatggcagaaccccgtctctactaaaaatacaaaaaattagccaggcatggtggtgcgcacctgtagtcccagctactcaggtggctgaggcaggagaatcacttgaacccaggaggcggaggttgcagtgagccaagatcacatcaccacactccagcctggaagacagagcaagaagaaagaaggaaaagaaagaagagaaggaaaaggaagaaaagagggaagggaagggaaagggaaagggaaaggggaaggggaagggaaggggaaagggaaagggaggggaggggaagggaagggggaaagaatgaaggaaagaaaggaaaggaaaggaaggaagaaaagaaatgattgtttgcttggtgttggaggggcttgagggggtggggaaaaaggggggaacccacacatttgatcaaagaactcttctgtgttgactgttgtggtatgagagcagagaaaatgcattgtgtttttcctgaaacacaagactccgaggcctacatcactcttgccccaagtagtgcttttctctcaagatgctcaggaggaatctttaaacaaagatgatcaaggaaatgaggcttatttataggtctgttttgaaggtggaaccagggattcctcaattggccaatcacttgagagagtagaaggagctgtcaccccatcaaaccaatcagaagccaggtgttggttcccaccctatgacataccacctccaattggccagtagaagtagagagacaggctaggaggcggggcctgcctggccgccatggtaatcccctgtggttggtgatcaaggaagagcatagtgccagacctaggtgccctcctgggaatgttccaggagggcaggagtaggaggaggagtgttagagtagaggggaaatgatgagagcagaaagggtatcataaaggaacctcaggggtgatataagtggacacagacatatgtcacaagggcacgggtttagaacaggaaggctgttgtacgtggttggagagggagttcaaagagtcagaaagctggtttcagaagttgagaggtgttagagggagacagggcaggactttgtaaggtgacaaagaagtagagactgaaaccctgtctctactacaaatacaaaaattagccgggcgtggtggcgggcgcctatagtcccagcaagaggagtgaataggtggtcaaataaggtcttagaggagctaaaggggcagggagcttatgggcgaacaggaaaggtttacagcaggaccccgcaggattcatagggacgaagtaaaggatattataaaaggaacagtgagagagctaacagaagttttactttggggggcagaggtgggaggatcacctgagcccaggaattcaagaccagcatgggcaacattgtagcaaaaccccatctctaccaaaagaaaaaaattttttttttttttttttttttttgagagagtctcgctgtgtcacccaggctggagtgcagtggcaggatcttggctcacttcaacctccacctcccgagttctgcctcagcctcccaagtagctgggattacaggtgcgtgccaccacgcccggctaatttttgtatttttagtagagacggggtttcactatgttagccaaggtggcctcaaactcctgacctcaggtgatccgcccacctcggcctcccaaagtattgggattacaggcgtcagccaccacacccagcaaaacaaaaacaaaacaaaacaaaattttagttagctgggcctggtggtgtgcacctgtagtcccagccactcaggaagctgaggcaggaggatcacttgagcccaggagtttgaggctgcactgagctatgattgtgcctttgcactcctacagcctgggagagaagaccctgtctctgaaaaaaaaaaaaaaaaaaaaaaaaaaacagaagacaaagaagttttacagggtgagagttttataagggaacagtgaatttataatgaaggttttatacccaaacacaggtccagtcactccacgcttgcagagtccaattaacaagagcaagttctggtagaaagaaggtgactttattccagagctcaggtgaggggaagaggtacaggttcctgccttaagggtattgcttcagctttcaggacagaaagcagggacttttaaaggggggcttgatgtgaatgacataaaggtggggggcaaggaggtgtggggtctatgtgacatgctttgatgtcttatctatcaggtgttctagctgtcaccatcgtgagaagagaaattgaccattgtctcaaggcaatctgatgggagagaattctgggggtgcctgatttgtttcaaggttcagtccctggaacttctaagtaaacatattgttagataagcttgccatgtagggaggttacagttgcattcctaaagagttaagtaggagatggggggaaaagaaaaaggaaaaaaatccttttttttctttaaaaatggggtactctggccaggcacagtggctcaaacctgtaatcccagcactttgggaagctgaggcaggcagatcacaaggtcggaagttcaagaccagcctggccaacacagtgaaaccccgtctctactaaaaatacaaaaattagccgggcgtggtggcaggtgcctgtagtcccagctacttgggaggctgaggcaggagaatcgcttcaacccacaaggcggaggttgcagctgagctcacgccactgcactccagcctgggcgacacagcaagactttgtctcaaaaaaaaaaaatgtggtactcaattacagtttcccactgtcaaattccattccatttctatgggatttggatgccacattcatgctggctacttcctgctgaaagagggcattgtgattagtcatcagaatggaaccgatccacttggagttggaaatatttatgagtagttggaccaatatggtgtaaggtctggaaagtctctggggaagtctgtcttgcattcccatatagaaggtgaaacagcagaaaaatccacagcagagaagtatgtctatcattgcaactagggccaaagttgtaaatagcttctttccaggtgagaacagtcctcacctgcaacaggatgccaaccattgacctggtgataatgtggggtcagacatagctttgatttttaggtgcatgtctctcagggctattgagacatttactgaattatctgagatgtgtacacagcatttagtcttaattgtcaggcacattcccagctgtcaattgtacctggagctcctgtggagatatgatgacagggtg[137 bp omitted]ctaccagaccgatgaactcagtctctactaaaaatacaaaaattagcgggcatagtggtgcacacctgtaatcccggctcctcaagtggctgaggcataagaattgcctgagcccaggaggcagaggctgcagtgaggcgagatcgtgccactgccctccagcctgggtgacatagtgagactttgtctcaaaaataaaaaataagtaaataagaaagggctgggtgtggtggctcatgcctgtaatcccagcactttgggaggccaaggcaggtgggtcacctgaggtcaggagttcaagaccagcctggccaacatggtgaaaccccaactctactaaaaatacaaaaattagctgggcatggtagcacatgcctgtaatcccaactactcaggaggctgaggcacgagaactgcttgaacccaggaggcagaggttgcagtgagctgagatcacaccattgtactccagcctggagaaaagactgagactctgtctcagtaaataaataagagcgatacagaggccaggcatggtggttcacacctataatcctagcactttgaaagatcaaggcagaaggatcatttaaggccaggagttcacgacaagcctgggcaacataatgagattccatctctacaacaacaacaaaaatcaaaaattagctgggtgtggtggtttgtaccagctacgtgggaggctgaggcaggaggattgcttgagcccaggagttcgaggctgcagtgaactgtgatcatgccagtgcacttcagcc[146 bp omitted]aaccccgtctctactaaaaatacaaaaaattagccaggcgtggtagcgggcgcctgtagtcccagctactcgggaggctgaggcaggagaatggcatgaacctgggaggcagagcttgcagtgagccaagatcgcaccactgcactctagcctggatgacagagcgagattccgtctcaaaaaaataaataaataaaataaaaaataaaaaaaagggatagagagaggttagaggagacatggtgggggttagagaaagtcaatgagaattttaaatggggtcaatgaagatcatatagctgccaaggagagatgtgttagggtaagtagggagagagtgagaaaggattgttagagttcagaagccatagtgagacataaccaactctctgccccccaggtgtttgaactgatgtctgatgaggatgaatccagcgactacctctgcctgtccatcctgggcctcttctgttgccttcccctagccatcccagccgtgatcttttcttgcctggtgggcacctgcatcatgccaatccttcaccctccctctccatcttgcccctgaccctgactcaacttcttccttgttctcccttctgaactaggagcctgagcaacaccagcacctcctgtgggttcagacccccaccctgagtccttacagttccacagcccaccctcacccaacaactgttttttttttttttgaaacagagtctcgctctgtcacccaagctggagtgcagtggtgagatctcagctcaccgcaacctccatctcgcaggttcaaacaattatcctgcctcagcttcctgagtagctgggattagaggcgcccaccaacacgcctggctaattttcgtatttttggtggagctgggtttcaccatgttggccaggctggtcttgaacacctgacctcaggtgatctgcccacctcagcttcccaaagtgctgggattacaggcatgagccaccatgcccggccacgcaataactcttttatactcatctttccctgttccctctctcctaaaactcagacaaagtttgtattgtagacaaagaactacaataaatccagtgactatgagctggcagccaagacctccaaacaagcctactactgggccatcgcgagcatcactgtgggaatcttaggtaccatcttgtacacctacctgatatacttacttagattgtaaactgcttcccagctcttgaacaaaccaccaaatatacaccacagtgcaatttaccttggctctaagcatctacttgggctgaatggaacacctgctcctcaatgtctggagtgccaagctatctaagattagaaaaacaaaatgcaaagtgttcttcctattcttacatgcccctcaaagtaacacttctttttttttttttttttttgacagagtcttcctctgtccaggctggagtgcagtgccacgatgtcggctcactgcaacctctgcccccaaggtttaagtgattcttctgcctcagcctcctgagtagctgggattacaggtgcgtaccaccatgcccagctaattttgtatttttagtagagacggggtttcaccgtgttggccaggctggtctcaaactcctgacctcaggtgatccactcaccttagcttcccaaagtgctgggattacaggtgtgagccaccataccaggcctcagcataacacttctaacaccaaatgttagagccaggggcaggggtattttccccacctaccaaccaaccagattctccagcagacaccaactgggtgtcctgtaatttaattcaattctgacactatctacctggagatggcatcagatcccacaggttgaaggctcagttccacaagactgcccccaaatttggatgtcagccacaagtggtaagttgtcacctagacttgtgactgacaagctataaatcaggtgttcccatgacccccctcctcaagcctgattaatttgttccagctggccaggtgcagtagctcaggcctgtaatcccagcactttgggcggctgaggcaggaagatcgcttgaagccaggagtttgagaccagcctggccaacatggcaaaaccccgtctctactaaaaatacaaaaattagacaggtgtgatggcatacgcctataatcccagctactcaggaggctgaggcaggagaatcgcttgaacccaggaggtggaggttgcagagagctgagatcatgccactgcactccagcctgggcaacacagcgagactccgtcaaaaaaaaaaaaaacaaaacactattatcactccagcgattccaagggttttaggagctctgggccacaaaatgggacctagaccaaatatatatgtcacagtatcacacaagtgttgccagcctgggtcagcagcttgaagggaaggaagtggtagtgccagcagcccactcgaccagaactcaagaccaactccaggaccctgctatggcgtgggggacatgggagagagaggaggaccccgttgctcgaggacagcctgcccagattcatgtattcacatcgcaagtctagttctgcctaccaagggcgttggctgtgctacctgactctggagacgtagcaatgactacttcaaattcaactcaaccccctcagaacatataaattggggtgagagacagacatgccaccagacagtgacaatcggagtggtccaatatataatggaagaaaacttgggaagggttactaaagaaacacttgtttaatgacactcgttacagacagtaaggcgggccaggcacagtggctcatgcctgtaatctcagcactttgggaggccgaggcgggcggatcacttgagcttgggagttcaagaccagcctggccaacatggtgaaaccttgtctctactaaaaatacaaaattagccaggcgtggtggtgtgcacctgtaatcccagctactcaggaggctgaggcatgagaattgcttgaacctgggaggcagaggttgcagtggttcgagattgtgccactgcactccaacctgtgggacagagcaaaactgactccatctcaaaaagaaaaagacagtaaggcagactttattcaggaccattgcaatatgcagagggaatactgagacaggggcctgcactggaggagaaagatggggctcaacactaaatacagcatgagcaagtgggaagtcctacccaaggagcagggtaggggtcagtggatggaaaattagtaagagaaaacattgagggtaagggggattctgactaaaccaacctaataggattctagttgaagacaggccagggtgaccagacatcaccagggggatggtggaggatgaggaacctgatcagatgccgaggtgtatcagatacagaggatgagggtttctagctaaactgacgtagaagggttcttttgctacaactggattttacaaagaagtgcacagaaggagaaggttcagatgcttttttttttttttttgagatggagtctcactctgtcacccaggctggaatgcagtggtgcaatcttggctcactacagcttccgcctcccgtattcaagccattttcctgcctcagcctcctgagtagctaggattacaggtgctcaccacctcaaccagctaattttttatagttttaatagagatggggtttcaccatgttggtgaggctggtcttgaactcctgacttcgtgatatgcccgcctcggcctctcaaagtgctggaattataggcgtgagccaccgtgcccagcctttcttttttttttttttttttttttcttttcttttcttttttttttttttttgagacggggtctcgctctctcactcaggctggagtacagtggcatgatctcggctcactgcaacctctgcctcccaggttcaagtgattctcctgcctccacctcctgagtagctgggattacatgcgcctgccgccacgcctggctaatttttttatttttagtagagatgggatttcatcatgttggccaggctggtcttaaaactcctgaccccaggtgatccacctgccttggcctcccaaagtgtaggaattacaggcgtgagccaccgcgcctggccgcccggctaatttttatatttttagtagagctggggttctccatgttggccaggctggtctcaaactcctgagatcaggtgatccacctgcctcagcctcccaaagtcctgggattacaggcatgagccactgggcccggcccaggttcagaagcctgactaaagtttggccaagcaaagaatccttgtcaggaggctgtaaataagagacctgtgagaaataaaaattgtcaggtgtctgagcccaagcctgcatgtatacatccagatggcctgaggcaactgaagaaccacaaaaacaagtgaaaatggccagctcctgccttaactgatgacattaccttgtgacattccttctcctggacaataagtctccggagctccccaccgagcaccttgtgacccccgcccctgcctgcaagagaacaaccccctttaactgtaattttccactacctacccaaatcctataaaactgcctcactcctatctccctttgctgactcctttttcggactcagtccgcctgcacccaggtgattaaaaagcttttactgctcacacaaagcctgtttgatggtctcttcacacggacgcacgtgacaaaaataaaatcctaagtccgccaactggctgaatgaacactgtcttggccaaggggcctacagagaaacactaaaagctgagttcctagccgtgactgaacgggtggtcgggcacacctcattctacctcctcccttgctgactgccatgaagctttcttccctaagggttaaacagaaaccagccctattgaaagactcattcactgctaatttcaaccaatggcctgaaatacatggctgctcctcccttttgtggtttcaacataacaactgaccagcattccttcctgatcagaggccacctaaccacggggtgtggctctggccagtctacagaggctgcacacaaagggcctttgtgtcctctgcatcaccttttgatgtatagggcctaattgta[138 bp omitted]catggtgaaaccctgtctctactaaaaataaaaaaattagccaggcatggtgatgggtgcctgtaatcccagctactcatgaggctgaggcaggagaattgcttgaaccctgggaaagagaggttgcagtgagctgagatcgcaccactacactacagcctgggtgacagagtaagactccatctcaaaaaaaaaaaaaaaaaaaaaaaaaagtgaatatgggatgttactacacatgtgctgtaccttcccttcatgaatattcatagctcctcctataacctgttgaatatgtatactgagccaagccattcagcgttaactctgaccttatccttcccttactggaggtgcctgctctcagcttctaccggaggctacacttctcggcctgtgagatggcccggctgcaggctgcaactctttatgagaaataaagctctcctttccaaatttgtaaacctgtattagtctgttctcacgctgctgaaaagaactgcccaagactgggtaatttataaaggaaagaggtttaattgactcacagttccgcagggttggggaggcctcagggaacttaaaatcatggtggaaaagaaagcaaaaacgtccttcctcagatggcagcaggaaggagaagtgccaagcaaagagggaaaagccccttataaaaccatcagatctcgtgagaactcactatctcaagaacagcagcatgggggtaaccacccccatgattcgattacctcccactaggtccctcccacaacacatggggatttggggaactacaattcaagatgagatttgggtggggacagccaaaccatatcaaaacctcatgattcttcagttgacatctaatctgagctaccatggtctatcaaaaaaccacagctcttgaggggatctcaatggctgttaacaaactggttagagttctggtcaggttctgattgtagagagcctctgtaacagatatggattgcctccttccccccaccctccttgttatttttatttcattttattaaatttttttttgagacagggtcacactatgtcacccagactggaatgcagtggcacaatctcagctcactgcaacttctggctcccaggttcaagtgattctcatgcctcagcctcctgagtagctaggactacaggtgcatgccaccatgcccagcaaatttttatattttttgtagagacagggttttgccatgctgcccagactggtctcaaactcctgagctcaaccaatctgtctgccttggcctcccaaagtgctgggattataggcgtgagccactgttcccagccatgatttttatttaacaaatactcattatttaacaaatactttctgagcacctactgtgtcccaggcattgtcttgggaacgaggaacacaacggagcaagagaagtaaggccaacttcttctctgatggagcttacattctagtgggaaagaaaactataaacaagtatacccaaaaataaacaagataattacagggaatggtaaatgctatagagaaaaataaaacagaataagaagctaaagtggtgccaggactggtccagcaactattatggtgttgggagcaagccccccaaaatatggccataaactgaccccaagactggccacaaacaaaatctccacagcactgtgacatgttcataatggccctaacgcccaagctggaaggttgtgggtttacgggaatgagggcaaggaacacctggcccgcccagagtggaaaaccacttaaaggcattcttaagccacaaacaatagcatgagcgatgtgtgtcttaaggacgtgttcctgctgcagttaactagcccaacctattcctttaattcggcccatcccttcgtttcccataagggatacttttaatttaatatctatagaaacaatgctaatgactggtttgctgttactaaatatgtgggtaaatctctgttcggggctctcagctctgaaggctgtgagacccctgatttcccacttcacacctctatatttctgtgtgtgtgtgtttaattcctctagcaccagtgggttagggtctccccaaccgagctggtgtctgcaatggtgtgccaccagataagtacggaaattgccagcaagtgtttagaaacacagcaatttgacatatccatgacatccaagtataggatcaatggattttcttgttgaacagggtagagaccaaaaggattggtccatgacaggttggaaacatcaaacaaatgatccttctccatagttacaagtagtttgagatacactgagctagtgggcaatgatgtctacaaggtatattatttagagtcatgctagctgctataacaaataaaccccaccatttcagtagctcacaaaataaaagttctttttttttttttttttgagacggagtttcacttttgttgcccaggctggagtgcaatggcacgatctcagctcacaacaacctctgccccctgggttcaagcgattctcctgccccagcctcccaagtagctgagattacaggcatgcaccaccacacccggctgatttttttgtatttttagtagagacggggtttctc[131 bp omitted]acattccagcatcagggtctttccacttgctgttcccactttgggaactccattttcacagttttcaagtagctctcacactttggctctcacgtctcagctcaaagaacatcttagaaaggccttctgtggcagagccagcaggatgtttattgactgcctagaccaggactacatttcccagaggcccttgcagctagttgaagccataagacaagttatgttcaatggactgagagcagaagtgatgtatgtcactttagggtgaagactttcaagaagcaggtgcgagttccttattctctcttctgcctggattcaaaagactctgagcccatagaagatggttgaatcaccttatggaagaagcctggatccctgaattactatgtggatcaggagaaatgtctgatgggatgttctatgagtaagaaatgagaagactcttctcaaacgtggaaggagctgctgaaaccaaaatcacaagtcctagagaagcttcttattatctctcagatggtggatgggttccaaaaagcatcctgaaattatccagaaaaacagaaaagagatttcagataaagcaaagggagagagatgctgacagaagaagaccaagaggccacaggggctctgctccttcaggatctaagaaagcaggaaggcaccagtacctcccaccaaggccaacagaacagataccatgagaaaggaaccaagaaaaggacaaatggtgacatgtctccaaaacaaggagacattgagcataagaagcagaaagtgaggccaggtgcagtggctcacacctgtaatcccagcactttgggaggctgaggcaagtggatcacttgaggtcaggagtttgagaccagcctggccaacatggtgaaaccccgtctctactaaaaatacaaaaattagccgggtatgatggtgcatgcctgtaatcctagctacttgggaggctgaggcagagaattgcttgaacccaagaggtagaggttgcagtgagccgagattgtgccactgcactccagcctgggcgacagagggagactctgtcacaaaaaaaataaataaataaaagcagaaagtggccaggtataatggctcatgcctgtaatctcagtgctttgggaggccaaggtgagaggactgcttgaggccaggagtttgagaccagcctgggccacatagcgagaccccgtctctacaaaaaattaaaactgaaaaaaatctagctgggagaattggctcaagtcccagctactaaggaggctgaggcaggaggatcacttaagcccaggagttccagcatgtgatgagccgtgatcgggccatggctccagcctgggcaacagagtgaggtcccatctcacaaacaaacaaacaaacaaacgagaaagcccaggtagcaatgagaatgagacttgcccagacaggcaccccgggtgactgctcctgggggtgcaggccatccattgtcctttggtggtgtctcagtccaaaggcaattgtgaccaaatcacagggacagatcaagtcttctcaaagcagagactggtgaaactttccaaatcatggcggtagggcacgccttgcatgttactgagaacttcctcctctctcttgactttgcagtctgagacccggtcatatctacatgtgtgtttggggcaggatgggcagagacatagcaggaaaggaagtcacaggggtgtgtcctaccccagccaggaagcaggcagcagggaccgctgtggggcatgcctggaggttcttcaccatctgctgagcaccagcataacaatgggacattgggactgtccacctgcactgtgctgttaccactaaccagacaactggctttcgtgggattcaccctgggtccctggggcagaaagcaccctaagtgctcagggccttcctctgaaggggtcactttttccttcattgtcttgggtgatgtaacaagctgtgccagactggaggaagtgagaccaggtgcctgcagtgagctactgagacgcaggtgacagtcacagcagttgcattatcagggagtttcctatggtcatctgaacttcgagggaggttttctggggccgggcattccttcctcattcccatttacctaaattggcccatccttgtctggtaggtcagcacccagcagaggcttctccccatgcacagcactgtgaggttcaggcacctgggcacagtaaccacagtgattcctggaagctggtgggcatgctatcctggggccatctgaactgggaaaagctgtgtgagttcttgggggccagcttgtagcctttttggctggggccaggttgaaggtcttcctgggaaccagagtcaagagcggccacttacattaagcggataaagcccacgactttcttgagctgcttgacagctgtaccaaaaaggcacaaacccattgaggatattatgaaacatgaatacagatgattattttattttggtttggttttgttttggctttgagacagggtcacccaggctggagtgcagtggtgccatcatagctcactgaagcctcaacctcccaggctcaactgatcctcctgtttcaaccccccaagtagatgggactacaagcgtgcaccaccacgcctggctaattttttttaatttttaatagagacaaggttttgctgtggtgcccaggtgggtctcaaattcctagcctcaaacattcctcccacctcaaccgcccgaagtgctgggattacaggcatgagccaccacgcccagccattgccttataattttttactgatgtcagatattgttaattttacagtgttggatgctggattttttttaatctctataaatattcttgaattttgttctggaatgcagctaaataatagcttgatcctttcgggccttgcttttaagcatggttggttagtcagcatcagagaagtatttcatctagggcaggggcaggggtctccaaaccccaagccgtgaaccaatacaagtccatggcctgttagaaaccaggctgcacagcaggaggtgagtggcgtatgggtgagcatcactgcctgagctccacctcctgccagatcaggagcggcattagattcttacaggagcgcaaaccctattgtgaactgtgcatacgaaggatctagattgcgcactccttatgagaatctaatgcttaggcggggcatggtggctcacacctgtaatgctagcactttgggaggctgagatgggctgatcacttaaggtcaggagttcaagaccagcctggccaacatggtgaaaccccgtctctactaaaaatacaaaaattagctgggcatggtagcgggcgcctgtaatcccagctactcaggaggctgaggcagtagaatcgcttgaaccccggaggcaaagattgcgctgagccgagatcgggccactgcactccagcctgggtgaaagagggagacttcacctcaaaaaaaaaaacagggaagaaaaaaaaaaagagagagagagacagagaatataatgcctcacgacctgaagtggaacagtttcatcccgaaaccatccactgctcccaccctccatcccccagactgtggaaaaattgtcttccatgaaaccagtccctgatgctcaaaaggttggggactgctggtctagcgcagacctctcacacctgctgtgtcccaaattgacccacccctgctgcttatttttaccacccctacctggtggtgcgtctgtctccccactcaactgtgagctccgtacaatagggaccagggctgttgtggtcaccatggtgtccccagcatcacccagcacagggtcagctccctgagtttatggaatggtaagcacgaatgaatgggaaaacgcatgccagggaaatgttagggtcatgctctctgcccctaccctccactcagacatgagacacctgtttctgaaatcaaagagcagtaagtccaggatctcattgcctggttccagtcctcctaggacgcaagtcccattttgtcaagaaaataaagggggtgagcgtggtggctcacgcctgtaatcccaacattttgggaggccgaggcgggaggatcgcttgagcccaggagttcaagagcccagaagctgagactagcctgggcaacaagtgagatcccatctctattaaaataaaagtgtttagttaaaagaagaaaaagaaaataaatggaagcatcaaggactgttttgcctctttcgggttagctggtagtgagcgggagaacgagggaaggcgggcggggctgcagtctctccacgcccttttcatttccactcaaggagacctacctgggaagagtgagcgctgcaagacccagcctgaccgcgctaagattactatgcagcgcccgagcccgctgtctgcccggcaaccgatgacgtcactgttggcgcgcccgtgacgtcagaggcgggcgccacacttgaagaggctgagggaggcggtgtcgccgccgcggcgctgtcatggagctagcgcaggaagcgcgggaactgggttgctgggcggtcgaagagatgggggtgcccgtggcggcccgggccccggaatcgacgctgcgcaggtgaggaccgctcctggagtgaggacaccccaccctggagattgagtctccgggagtgagaactccacccctcattgaggactcgactccccccaattccccatcgagagtgacccgacttactgagggctccctaccctgggaggctccccagagtgaggtccctagcactggtgaggatcctccacgagttagctaagacctcgctccttatggaaataggatctccagagtgaggctgtccccgcagcacctcccctccctcccttaacctaaccaagaaggacactcaggagttagccgtggccaccccatcggggattgaagctgtaggagtgatgccccacgtctggtcatgagatggcacttcctggcagtacatcccccacctccacctctggatgtgactgggataacccactcccaggagaaagggagcacccgcctctcccgcgctcccccaccacccgccttcccagggaatgagaataacaccacacttagtgcaaacatccagtccctacaaaaaaaatgttttaccaattagccgggtgtagtggtgcctgcctgtagtcctagctactctggaggctgaggtgggaggatcgcatgagcccaggaggttgaggctgcaaggagctatgatcgtaccactgcgacagagcgagactgtctcttaaaaaaaaaaaaaaaaaaaaggcaaaaaaaagtttgggccttccctcctcaagaagtgagaactccctagtaaaaactccctaccaccatcaccctaggaatgaggatcccacaccctgtgtgctgccccaggcatatgcttacacactgtccccacaggctgtgtctgggccagggggctgacatctgggcctacatcttgcagcatgtgcacagtcagaggtaagctgggctagagcaggggagggggcacaggtgaggcccatagtaactcctctttctgcctctgcactgtaggactgtcaagaagatccggggaaacctactctggtaactgcttcttaaagctatcccctcctgtcttccccactcccatttagccctgtccccaccacagcatcacacctattgccctcccccctagaagccccactcatccgctgactctggcctcgttttcctaggtatggccaccaggacagtccacaggtgagaagcatatgctacaagattctctttcatccgaaaaatgacttgtagatcttctgctctaagcccaaccaggtgctgggtgatgctggggacaatgggtcacaagacagccttgatctccatcctcatagggcttaaagtccagtggaaacagcattagctcagccaggtgcagtggctcacacctgtaatcccagcactttgggaggctcacctgaggcctcatctcaggtgatgagatcacctgagggctccaggaagcgatcagtactgggacaaagatgtggtttgggaggcggatcacctgaggtcaggagttcgagaccagcctggccaacacggtgaagccctgtctctaataaaaataaaaaattagccaggcgtggtggcacacgcctgtaatcctagctacttgggaggctgaggcaggagaatcgcttgaacctgggaggcagaggttgcagtgagctgagatcgcactactgcactccagcctgggcaatagagcgagactctatctcaaaaaaagaaaaaataaataaagagcattaattagctgggcgcagagaggtgggacctggatatgtggcatcaaagctggtgagaagagatgatgggacaggtatgggagagatgctgaggccagtgtgggacccaatgggtgcaaggggctcatatgacacctaaggggaggcttccaggaggccttgggacttctaggtgcagggctccgggaagagatcagtactgggacaaagatgtggttgtcaccagcacagacaggaaacaggctggaagtgtgggtaagacaatcctaggaggaaggagggagggagccaataccctaatgcttctgtgtcagacacagaaactgctgagcaaaaaccctctgccaccagttgaggagcctggtacccccaaaagacaggccaggctgagccccgatcagaccatctgaccctgaatctgatcctcccaggtccgtcggaagttagagctggaagctgctgtgacccgcctgcgggcagaaatccaggaactcgaccagagcctggagctgatggagcgagacactgaggctcagggtgagccatggggccagaagatgggcaccagaatgtggggcgggaaaggtgctgatggccacccctgttcctcccacagacacggccatggagcaggcacgtcagcacactcaagacacccagcgtcgagctctcctcctccgggcccaagctggggccatgcgaagacagcagcatacgctccgagatcccatgcagcggctgcagaatcaactgaggcgcctgcaggacatggagaggtgggcctcagggacccaccctcaccaggctgggtggccagacattctcttagagacctcagggctctgccctgatcccttcttgggttccagaattctggaaccattaggatggaatgtccatgaggccaggaggttttgtcatctcagtcacctgtattttcagtgcctagaatgataccacctgtatacctagaacaccagccctggggaaacagccacaaacagagaacatgtccctgccctcctggagcttatgctgtgacacagagaagacagatagtaaagtaggaaccaaacagaccctatcatttctggtagagatgagtgctgtgaagaaaagcctatcatagaagggagagggagatgctgccctagcgagggtggtcagcgaaggcctctgaggaggggacattgagttggaagaggaatttctgtggagaaggaatagcaagagcagaggtggtgtgctcagcatgcaggaagagcagcccggaggccaatgtcagctcaagtttctcaggcaagaccgagaacctgaggaggtgaggtcgaaggagtggacagagaactgtggatgatgtgttgcgattttaccctgacactggttcatgccctggcttggccacttaaaattgggtgacctaaggctgggcatggtggctcacacctgtaatcccagcactttgggaggccgaggcaggcggattacttgaggtcaggagttcgaaaccagcctggccaacatagtgaaaccccgtccctactaaaaaatacaaaaattagtcgagtgtggtggcacgtgcctgtagtcccagctactcaggaagctgaggcaggagaatcacttgaacccaggaaaaggaggttgcagtgagcctggattgcaccactgcactccagcctgggtgacaagagcaaaactctgtttaaaaaaaaaaaaattgggtgaccttgggcaaggtatttaacttctttctatgtgcctcagattctaagatctgtggaatggggataatattaataccaagcttatagggtaggcatgatcgttaggtggaataaatcatgtgaagtgcttagagaagtgcctgttaaccattgttattctgggtttggtttttttgttttgttttgttttgtttttttgagacagagtctggctctgttgcccaggctggagtgcagtggcatgatcttggctcactgcaacctctgcctctggggttcaagcgattctcctgcctcagcctccccagtagctgggattataggcgcatgccactgtgctcgactaatttttgtatttttagtagagacggggtttcaccatgttgtccaggctggccttgaactcctgacctcaagtgatccacctacctcagcctcccaaagcgctggggtacaggcatgagccaccacgctgggcccattgttattctgaatgcgctggggaaacatcacattattttggacagatctgagcagggacatgatcttcctacagttttaacagaatcactgacttctgggtggcaaacagtctcgtggagcaaaagcagtggggaggctaatgcaatattccagctgggaggtgacagtggcctaatctggagatggctcccgagatctaggcttagtgattcctctgaccggccttgctggcagtgagaggagatggggcacagacatctgttctcccagggaccccagccccagctgcacttctccctccaggaaagccaaagtagatgtgacctttggatccctcacgtcggcagctctgggcctggagcccgtggtcctggtaagagtcctggtcatgggagaaggggcagggagcctggagtcaggcagatgctagggtccccctcaggtcccttcctcctcttctccctagcgtgatgtccgaacagcctgcaccctccgggcccagttcctgcagaacctcctgcttccccaggccaagaggggcagcctcccgtgagtgtccctagcccccagagaccctgtaaagaccctgggttttaagtgggggtctcttatttattaattcctcagacactgagcttctgggctacgttctgtagaaggggacttccaggctgggaatagaaggagacagtctctcatcacaaacagtgacagccaggtggtcagggctgttgcgggagtgaggaggcctgagaggctctgggcacccagaggcagtgcctttcccagctaagaaggcagggaggggagaggttctctggtgaggaggcttagctggggtgaagggtccagagagtgtcccagatgaacaacccatgtaaaggccccaaagccagcaggttggtataattggggaactcaagtctaacaggcatagggaagatgacagcccctaccttatagggtggtggtgataactagaggataattgacgtgtcttgtaacgttctctgtccgcttacccaaccccacagaacccctcatgatgaccactttggcacttcgtaccagcagtggctgagctcagtggaggtgagagggcagggctctcaggaaagccacaccctcccgctccttgatcaaaacttagggtgccaggacctaactcttgatgacagccctattcccatggggtctcagctcacagccctgccccgatcctgccctgacttcaccctccctccccctagacgctgctgacaaaccaccccccaggccacgtcctggctgccttggagcacctggctgcagagcgggaggcagagattcggtccctgtgcagtggggatgggcttggcgacacagagatatccaggtgtggggcagggtattctcacagttggggaaggccatgtgagtgggtgagctgggacagcctcaggacccctggcccagccacctgctgatggggtagaactgaaacccactgcctggtggggtggcaggactgatactgtccaccctcgagtaccaaggcaaggccgcagcacggctccctcagcagctcttcccccaccccagaccccaggccccggaccagtcagactccagccagaccctgccgtccatggttcatctcatccaggtgaccccagggctcgcctccccaccacattccaagacttccttaatcccctcacccatggatcatgccctgggtgtaccctgattctgtaccccgcttgcaggagggctggcggactgtgggtgtgctggtctcccagcggagcaccctcctgaaggagcggcaagtcttgacccagcgcctccagggcctggtggaggaggtggagagacgcgtcctgggatccagtgagaggtggggggctctccgagaagaggtctctaggccatctcgcttctgagtgtctcagcccattggactttttcagcctctgtggctcctatctctgcctcctctccctgcagtgtctctccctggtttatggtcccttgtgtggctcagtcacccttctctcctttgctctcctccacttgccctgcaggcaggtgctgatactggggcttcggcgctgttgcctgtggacggagctcaaggccctgcacgatcagagccaggagctgcaggatgcagctgggcatcggcagctcctgctgagggagctacaggccaaacagcagcggatcctgcactggcgccagctggtggtgagaggctaggcccagggccttgtggagggccagaggggaggcttgaaaactatggctaagaactgggcctgagccctgtgtggtagcacatgcctgtggttccagcactttgggaggctgaggtgggaggatctgagcccaggagttcaaggctgaagtgaggtatgatcacaccactgcactccagcctgggtgacagagcaagatgctatcacttaaaaaaaaagaatgctgtcacttaaaaattaagaactgggcctcctaggcaagagcccaggtgagactcccaggcagaagcaggacctaagcagagaggcacactgaggctgggagctgggaggagtgggtctcagggtatcctggttcctcaggaggagacccaggaacaggtccgcctgctcatcaagggaaactcggccagcaagacccgcctgtgccggagcccgggggaggtgagatgggagttggggtgaggtctgggtagggctggatctgccaggatggggctgggtggacttgtgatgttgtgatgccccacccacccctccccttccccacaggtgctagctctggtccagcgaaaggtggtccctacatttgaggcagtggcaccacagagccgggagctgctgcgctgtctggaggaggaagtccggcatttgccccacattctgttgggcacgctgctgcggcacaggccgggagagtgagactggggctgccccacccctgccctgcatcccctgccatgggtgactgtcactccctgaacctcctcaaaaaagataaccccagacccccagtgttcccaggctgccagacctcacccttgggtcagcagccctggtcttggcatcctagtccccagacccaccttgaagttcctgggcccccagagcctccagaacccaaggcctcctctcagtccccacccaacccagacttctccccgcccgtaggttgaagcccctgcccacggtcctcccatccatccaccagctgcaccccgcgtccccaaggggctccagcttcatagcgctgagccacaagctggggctgcctccagggaaggtgagtgcccgtctcctgtgacttgtctccccagccccgccccaggtgaccgtccttccctcctcctccaggcctcggagctgctcctgccggcggctgcctctcttcgccaggaccttctgctcctgcaggaccagcggagcctctggtgctgggatctactccacatgaagaccagcctgccgccaggccttcccacccagggtaggtctgccctgccaccccatccagcctccccgcccattcccactaccagcagcctccacgagtccttaccagcaaccccgttgtttacgcagtgcccattgtgtgctaagggctttaaacattctcccttgtttcatctgcacggcagtcccataaggtaagtgctgctgttctctccattctacagagaagggaactgagacgcagaggttagtaggttgcccaaatggcaaagctggaatttgaatccaggtggtctgaaatgggtctgtgctcccaaccactaagctacactgccgtcgactttccacgtgttcattcatcaccgtcacatagtatacctcagcagttcaaagcctgggaatcctctctgccgtctcttcctagctgtgtggcctccccgtgccttagcttcctcctcagtggagtaagcatgaagcaatatcttaccgaggtgctgggcagattgaggcaggggacccacacagggcactgaacactgcctgctatgcagtaagcaccctgtgtctccaatgtgattagcatcattgtctgtgtacacacacagtctcttggagtcatgacgatgaggaaagggacttttaagaaccccagtttacagatgaggaaactgaaggttagagaagtcattcattcctggattcactcaccaaatactgggtgtctaccaggtgccagcccagatggcttgatggggagtgaggagaaaggtccccaccccaggggtttccccagatggaagtaaagagtaaagaatgaaaggataaatacatggaagaggagaattgatgagaaatgaaccggcagtgccagcagcactggaggaagagactgttcaagcctctgagtttggggctccctgccctccacttcttcacaaggggagggaacagtgtgcaggagcaatgagagcagccccagaccccacacggcctctgcccacctcagcctctgcctaccacgccctctgcccacctcatgtgttttttgtttttgcttttgtttttttgagacaaggtctcattctgtcactcaggctggagtgcagtggtgccatcctggcttactgcagcctcaacctcctgggctcaagccatcctcctgcctcagcctcccgagtagctgggaccacaggcatgcaccccacacccagctaattttatatttcttataatcatgggcatcttgaactgtacacatctatcatggaactcctggttctctctactccaaaaaacaattttgttcctcttcttggtttccttccttgttaaattatctcaccctcctcatccaagtgctgcacccagaaacccaggagtcatcctgaatttctccatcaccctaatccccccaccctcaccagcttcagcctctcagcaagccctaagggtcccatccccagagttctcccatcggtcccctgccccagtaattccacctgacagcagacggagctgaacaaagagccagtgtcgtgatcaaggtcacagggcagggatgggatggggtcaggattcaggcccagcttgtctgatcacgctgctcgtctgcacttgctgagctgggcctgttctgtgcacatggagaggtaggcccagtcccagtcccagaggaaagcaccgctagggtgaagctagagcaggcggaggaggaagccttggagcgagagtgttggaggggcctccaggaggaaagatactctctactgtgggccctgggaatcggccaggctttgccacatcatgaaactcaaatacctgctgaagggcttggactctgccttgggggcactggagaaccttggagggttctagacaggagggagagcatcaaatttaggcttcaggaagatcactgtggtgtagtgcggagggtgaaccagagcaggagactgaggcctggagcagaggagaggaagaaacgctcaggagactgagcggacaggccatggagattgatgggctctcacggggagggaggaaggcatccagaaggaggcctggatggggctgggggtggtggactgcccttgagatgaggatctgggaggagggacaggtcctcatctcaagggcagtccctcagaaggggacttccaggctgggaagagaaggagacagactcatcattggtttgcgggagctgctgaggtcaagactaggggactggagaattggggactcattgctgtaaggtaccagcgagccagaggactcaaagctgcctcctggctttctcaccctcagagctgctgcagatccaggcatcccaggaaaaacagcagaaagagaacctggggcaggctctgaagaggctggagaagctactgaaacaggcactggagcgaatccctgagctgcaggggatcgtgggggactggtgagaggggaacgtgccgcggatgggaaacagaaaagtcaggactcaagctgggggcctgatgagaaggagcaggccatggttttgcagggagggtctggagggtcagtcctttcctcgttgacgccatgccattccccaggtgggagcagccaggccaggccgccctctctgaggagctctgccagggcctgtccctgccccagtggcggctgcgctgggttcaggcccagggggccctgcagaagctgtgcagctgaagagagggttcaaacggaagccgagaacttgacactgttcaccccaacacctcacctcccccaggacatttggaagaaagcagcgccaggattcctcggcagtcgtccccacccgcacctgcagtcccctcatgtgctgttctgctgccccactcagctcctggaccctgtcctttcatcccgctaaagcaccccctaaaaccccttcatcactttcattctcagcaaaaagtaattgagcacctcctctaggcgctggggagtccacactgaacaaaagaaacagaaaaccctgtcttccagcagttgagttctagggcagggagacagagtttacaagataaggaaaatatatatgtagtatgctgcaagttaactgctgtgtgggaaatccagcagggggtgggatgtgtgatttgaattgagggccacactgcccaggtcgtgctccgtcaaggggtgagcaggagcaacaggggtggctgagtaagggcttgcagctggaggcaacagcacatgcaaaggccctgagccaggatgtgctgcaataagggccactgagggggacagtgtaggttgggggtgaggaatgtattaaaagatgagattgccttctagtttgtatagtttctttttttacatgtaaatcagccatttggaatttatcctagcacatggatccaattttgtcttattttacatatatcctagtagcacttactgaaattcccagtcagagtggcagttgcctctgagggaaggtgggtggcagggatcaactgaggaggagacacagaaatgtcctagctgatgggaatgtgctgtgtcaagagcagcggcggtgacgcaggtgtagagatttgtcagagctcatgtagttgtagtcttaaggcctgtgcatttcactgcgtgggttactcaatttataaagcaaagcccttacacttttgagatgccacctttttatgcactaaatttccatgtttaattgggttatatctggcttctctccagacctgctttgtatttaactctccatgtgtcattcctacagtagcttaatagaaaggcttgtgacacattgtcatatctgttcttgttttcttttgttttttttttttttttttttgagatgcagtctcattctgttgcccaagttggagtgcagtggcatgatctcagctcactgcaacctccgcctcccaggttcaagccattctcatgcctcagcttccccagtagctaggattacaggtacgcaccaccacgcccagctcatttttgtacttttagtagggacggggtttcatcatgttggccagactggtctcgaactcctgacctcaagtgatctgcctgcctcggcctcccaaagtgctgggattacaggcatgagccaccgcgcctgaccacattgccatatctgaaatggctggattctcttaggtgcttttctttttctttctttctttctttttttgagacagaatctggctgtttcccaggctgaagtgcagtggcatgaactcagctcactgcaacctctgcctcctggattcaaacaattctcatgtctcagcctcctgaatagctgggattacaggcacccaccaccatatctggctaatatttgtattttttgtagagtcggagctttaccatgttggtcaggctgctctccaactcctggcctcaagtgattctatcgcctctgcctcccaaatcttcacctgctgggattagtttcccctgtctcagtaaattttttttcccaaactaagtgaacattagatttaatttggctggccccagaagaaaaacatgcacagatggtagttttactggtgttgcagtaagttttcaaatttggaagtttggcagctttatgatcttgaaccttgctgtccatctctcacacaactcctctcttggcctccagagtccctttactctcccagctttcctcctgcccctggctgctgtttcccagcctttccacattggctttcccatgtagtccttagtgtgtctgctcctcctctctctcctcatcacagttcccagcccccaccttcaactgaactcaacaaaatcttcaacttcatacagtagtcacattgttagtaataacactggcatttttattttgataaaatagaccgtttaaatttttgagattctaccttatattttttgaattatatactaaagcaaataagtagtgatgtaatgtcattggggaccaagatttttagtgtaaatgaaaaaagataacaaatataaactcaagtaaacaccctgtagtctttcacatgaattggaaatatcagaataaagtcatgatttttctctttctaaaaaatatgtatttccctagttaagtcccctgaaaaggtctaaatataatgacaccccagtaacactgagcagcactagtatacagactgtggtctctataagtgccatttctgactaagaactagggacttttgtgaaaacagctgattccaggtctggggcaagaaatgtgcaaaatgtgtccaggatattttgtgccaggaagcaaagagtcctccaagactactgtggccaagtcaaaggaactcaggagccagtctgaagggctgtcactcaccaaaggtgggacatgttgagcagcaaaaagaaccacagtggtttgaagcacatcaaatatgcctgaatgtgtaagttcatgttgatactcatatacctcattgaaatcacctttgaagagtactaggaacccactcattattttgaaaaattttttatatataaaataatccagcatgttctctatttttcttatatgtgaacaagtaaccaacttttttttttttttttttttgagacagggtcttgtgctgtcacccaggctagagtgcaatggtgagattttggctcactgcaacctccgcctcctgggttcaagtgattctcgtgcttcagcctcctgagtagctgggattacaggtgcgcgccaccatgccaggctaatttttgtatttttattagaggcggggttttgccatgttggccaggctggtctcaaacttctgacttcaggtaatctgcccgcctcagcctcccaaagtgctgggattataggtgtgagccactgtgcccagcctaagtaaccaaatttctgatgaagaggttatttatggaagaatcacaactaataacttcagagaaaatactagaattcaaaaaccactatttgctattaattaatctagtgatggatacaggtaatgatgatcaagggctactaaaactattaggggaaaggttgattgggcttcttaaaataggtagaccaggatgacaccactgatcaatcctgatgccaaaggaaggcaaccagacatcttgtgcttctgatgggatccaataggatacaagggatatgataccatacaatattatctatgaagtgtgcttttaccaaattaaacctaaatctcatctagccttagctctcactacaagcatatgggaaaggggcagaaggcagtcagaaacaagtgaaacaaaaaggatgtaattagttaaattcaaaatgtgtgacaccctataggataaatgatccagtttcttcaataaagagaaggcaaaagggggaatggagaaagaaagaagaaagggagggagggaagaagggaggaaggaaggaaagaaagaaagatggcaggcaggcaggtattcatttgtactgattcatactgcagcttcaagaaaccaaggcagccaataaaattaaattttcttttttttttttttgacacggagtctcgcactgtcactggagtgcagtggcacaatcttggctcactgcaacctccgcctcccgggttcaagcgattctcctgcctcagcctcccaagtagctcggattacaggcgctcgccaccacgcccagctaatgtttgtatttttagtagagacggggtttcaccacgttagccaggctggtcttgaactcctgacctcgtgattcacccgccttggcctcccaaagtgctgggattacaggtgtgagccacctcgcctggcctctaagtttttcttgttggtaaacatctgagcaagcaaaaatttaagttttgacaggaaaaaaaaaagacaatcaaatgcaatatttggaccttgttttgatcctgattctactatcgtataaagacatttttgagacaaggaaaactgaacacggtctgggtgttagatgatactaagaaattaatttgatggtattcataatggcatagttaatggtattttttttttcttgacactgagtttcactctatcgcccaggctggagtgcagtgacgcgatctcggctcactgcaacctctgtctcccgggttcaaacaattctcctgcctcagcctcccgagtagctggaaccacaggcgcacgccaccacggccggctaattttcgtatttttagtagagacagggtttcaccatgttggccaggcgggtttcaaacccctgacctcaggtgatccgcccacctcgacctcccagagtgctgggattacaggtgtgagccactgagcccagcgttaatggtattttttaaaaatagttcttatcggccgggccgagatcgcgccactgcactccagcctgggcgacagagcgagactccgtctcaaaaaaaaaaaaatagttcttatctgttaaggagacataatggcgcatttatgactgagttgatgtctggaatttgctttaacatactccagcaaaaaaatataaaaataagaaaagtataaggccatgcgcagtggctcatgcctgtaatcccagcactctgggaggccgaggcgagtggatcacttgagatcagaagtttgctaccagcctggccaacatggtgaaaccccgcctctactaaaaatacaaaaattagccgggtgtggtagtacacacctgtaatcccagctactagggaagctgaggcaggagaatcccttgagtccaggaggtggaggttgcagtgagccgaggtcacactactgcaatccagcctgggcgacagagcgagactccgtctcaaaaaaaaaaaaaaaaaaaagaagaaggtactttgtaacattctccccgcccttgagaatgtactttataagcctatcccaaacctgtaagaactaatgataatcccaccaccctttgctgactcctttttcggactcagcccgcctgcacccaggtgaaataaacagccttgttgctcacacaaagcctgcttggtggtctcttcacacggacgcgcgtgacaaagaagtatagatcaagtgaaatccagaagtgttgaatattggtagcgtttgagatgtacttaagagtgcgttatactattccccttaatgtgcatgtttgaaaatactcagaataaaacacttgtgagggctacgggaaaaaaaaaagggtcagctgtggcccaagaaaggacagggaccaagcccacggacgtgctcctctgagttgcactagtctctgggccttggctcccaccctgaacagctctcatctttaaatgtcttcagctgtcctcctccaggaagccgggtcaggcgcttcctcccgggcgtctccggtcttcctggaaaccacaggtcgggtgtcaacctactccaggataggggccccgaggggccagccaggcctcccagccttgcccaaccctggggttgacacggactttagcgtctttttaaacttccggcgcgggctctgcggtggcacaggagggtcctccaaactttcctgcgatctcaaaggtccagattccacattggggatgggcccaactgactttgcttcgctctcattagccggtggtcctccaggaaagcggggccgcctctccgctgtgctctcataggcccaggttcttgcgttcgtgtgtccttctctcactctgattggcctatattccccctgagggtgtggccaaatctcattggctctcgcgcccgaatgtatgacgtcatgcgccagcgcccgtcgcttttgctggacgtcatcctcgggagcccacccggacgaagggggagagtagacagcagaaccagcggcggcggctaagcagagactgtagtagcggcgacagcgacgacggcagcgatggctggggcggggccagccccgggactcccgggtgcaggaggacccgtggtcccgggtcctggcgctggcatcccgggcaaaagcggcgaggaacgcttgaaggaaatggaggcggagatggccctgtaaggcccgcgacagagagtgataaaagtcgtcccagagccagagccaccgaatctcggagcctccaggcctcgataggccggagatacggctctaacatggggaagtgggaccttcgggattgtgggggcggggataggggagaggttggcaggggtgagggtcccctcgcgatatacccacagttccaaaattggtacgaggtcctgagcgctgatgtctgttctactcctccaggtttgagcaggaagttctgggggctccagtacctggaatcccaactgctgtgcctgcggtgcccactgtccccacggtccccacagtagaagcgatgcaggtcccagcggctcctgtgatccgcccaattatcgcgaccaacacataccagcaggtacggctgagctaaggcatgtaagtcagggaacacaatgcctcgaacagagtaggtgtttgtgtacagagagctgttgacgttttggcttgttgactaattagcatgacaaatattttatatgccaggcactgagaacacagtaatgactgagagagacatttctgccctgtgggagcttatattctagaacatgttgtccagtagagctttctgcaatgacgagactgttctgatatatttaaaatttatatttaatagttcgttattctcattagtcacatttcaagtgctcagtagccaactatatatgactagtagagaaagagagagaaattattaagatgaaaataggctgggcgctgggcgtggtggctcacacctgtaatcccagcactttgggagaccaaggcgggcagatcacgaggtcaagagatcgagtccatcctggccaacatggtgaaaccccatctctactaaaattacaaaaattagctgggtgtggtggcacgtgcctgtagtcccagctacttgggaggctgaggcaggagaatcgcttgaacccaggaagcggaggttgcagtgagctgagattgcgccactgcactggagcctggtgacagagcgagactccgtctcaaaaaaaaaaaaaaagccctgaggcaggtgcatacctgttgtgttgttgtgttcaaggaacagcaaggagaccagtgacagtggagtgagcaaagaggaaagtgggaggagataaggacagagaggtgaggccaaatcttgtagagccttatggccattttaagaaccctggtggccaggcacggttgctcacgcctgtaatcccagcactttgggaagccaaggcgggtagatcacaaggtcaggagttcaagaccaacctggccaacatggtgcaaccccgtctctattaaaaatacaaaaattaggcgggcgtgtcggcgggcgcctataatcccagctactccggaggctgaggcaggaatatcacttgaacccaggaggcggaggttgcagtgagccaagctcgtgccactgcactccagcctggacaatagagcgagactccgtctcaaaaaaaagactgtaagggacaagggcagaagccaggagatggaggaaggggctagtacagtaatctagacaggagttaatggtggcttggatggaggttgtgcatgggagatggggaggacaggttggacacagtttcagtgggtgctaagtgctgtggggaagatgaaataaggtggtgagagaagttgctgctcagagagccctagtgtgatccaaaaagcctccccgagaagtggcattttagctaagacctgagatagccagccacatacagagcacaaagcatgaagctcttggtctcttggggtgagctggccgcagcagatgggaatgctgagtcaggcccctcaccctgacctcttcctcgacaggtccagcagactctggaggcccgagcagctgctgcagccacagtagttcctcccatggtgggtggccctccttttgtaggccctggtaagtaaagagtagcaaggtgagggggttgggcaatcaggcagggtggtaaaaaggtgtgcacaggactctcctcccaccatccttgcctctcccctcccaacagttggctttggccctggtgatcggagtcacctggacagcccagaggctcgagaagccatgttcctgcggcgggcaggtgagtctggggccagggacccccacatttaatcaggcactcttgtttacatgacttcagcctcttgcctaaatccttgctctaaattaccctttgcctttgatcccaacttgatgttgtcatcctaaagcacgaacctgatcatgtcctttctgatgatgtcaattttgttttaacctgatcattgcaaaccaaccctcctgctgtcagtcctaattcccagttaccacagcacttaacacctcataacaagctatataatttcttatttactatggctatcatcttttgcatcctctaaaataaaagctccatgaggggcagaagtctcagtatctgccacataggaagcattatgtactgtctgttgatgggatgaacggactgttgagacaagcgccaggcttttcccctggcagtcacaaccctacatgaccttgcttcttgcagggagagatccccagcagcccgaacatttctgggatgtgccagcagtgcttttgttaaggtcccttctctccctgctcactgtcacccagctgtaatcttccagccatccttcccccccaggccattttctacattccaccttttgttcttcaggtaacctttactcacactgtcaatttgtaggacattacttccttatatgtatgaaaaggatgcgtgttcttacttggatgtaaaattctggtataatctcggttaaaccaaacgtgctacttatgttacctaaatcctgttatacttattaatctgatgatctctgagaagttgtaatgtctcttactttttagtatggttttgatcaaaatgcaaatctgacctacttcccctgcccagcttccaaccctgctgtggctccccagtgccctcaggaggacacccatggctcagccaagaatgctgtgctttaagaacaaaaaagctctactggggtgcctgctggctgctcagcccttctcatgacactctctaagccccactacttctattacagttacactaaactgaaaagggaaaggttttgcttataaatattcttcctgccaataatattcccactcaccccttgcctaacacttcattgccccttgggtctcagctcacaggtccctttctccaggaagccttccctgggcctggctgggtcagagggctcccctctcttagcactgatcccactgcctgggcttccctgcttccagcgctggtccccactggctctccttctctagtgatgtctccattccctcctcctctggaccaggagctccctgagaaccctgggtctgttggtgtgtccccagcattgcctgccacagggctgagccagaggagcttctcagtggtaaattttcatggaatgaaccaggggagaggcccccacatctccaggagggctccccagactcttctccaggatttcttgatgctgagagtgcacacacacacacgcatgcacacacacaccttgtcccaagtgcccctgtcccccatgacacacacccccatctctctctcccacagctgtggccccccagagggcccctatcctgcgtccagccttcgtcccccacgtgctacagagagcaggtgaggggccagggtcatcatccctgccacataactccccccaggccctggaactccccactaacaccctgacagattccgctctctcctctgcagcagccggcccccgccctatggccctacggccccctcaccaggccctcgtgggcccccctctgcctgggccccctggaccacccatgatgctgccaccaatggctcgggctccagggcccccgctgggctccatggctgcactgaggccccctctggtgagtgtgaacagggaactaacggtcagatgtgcggtggacggggagaccatccatcctggcccaatgggctatgtctgagttggcctctctcctgactttctgtttctctaccttctcactctgcctttgtctctgtctctttctgcatctttctgtggcaaaatctgttctctccttttgtgaagggagtacagagagaaacatgctattggaatatttctcttttgattgttactgatgttcttgtctgtggctgtctctctctgcctgtgtttctccttctctgtgtttgtctggctggagactctctgcttgggtgtctcttggctgctctctggcccccaggccctttctttgttggatggaatggagatgacagtaaagtctgagcctgtgagccggcccccctcatgctctcctcttacccacaggaagagccagcagcaccccgagagctgggcctaggcctggggttgggcctgaaagagaaggaagaggcagtggtggcggcggcggctgggctggaggaggctagcgcggctgtggccgtgggggcaggaggtgccccagctggccctgcagtcattgggcccagcctgccgctggccctggccatgccattgcccgagcctgagcccctgcccctcccgttggaggtcgtccgcggcctcctgcccccgctgcgcattcctgaactcctgtccctgcgtcctcggccccggccccctcggccagagccacccccaggcctcatggctcttgaggtaagcagggagcctagcggtgaagggacagaagggacggggggcagacaggagcccaggaacttccacacagacagaccggacagcaggaggacctgggggagggaggcggacacatgtgccccacatccagaagcacatccagcccttactgtggtggcaggagggccggggaccaaaggacagtgggagaccccaataccaacccctttgcacctctcccctttcctctgcaggtcccagagcccctgggtgaagacaagaagaaggggaagccagagaaattgaaacggtgcattcgcacagcggcagggagcagctgggaggaccccagcctgctggagtgggatgcaggtaagctgctgaagctcgaggtcaggcgtggctcggccaaggtcagaccaggctgctgtccttgggctgcagactgggagggtgaaccctctcagtagggtgggcgctgttgttagcccaccttggggaggggaggctatggctcaggggctggttcttcacctagccatgggccggagcttggtggaggtgacggggacatggggctttgtagcctgttttactcatgaggtgcctggcttcagagagcattctttttttttcccaactcttaggataaaaattttttttttttttttttatgagacagagtaccactctgtcgcccaggctgcagtgcagtggcgca[131 bp omitted]aaacacccgtctacccaccacctagattctgcaattaacattttgctgtgttcacttttttcctctttgtgtatgtatctggtttctttgtttttagctcagtcatttgaagcaagttataagtgaattaatcacttctaaatatctcagtatttatctcctaagaaaagagatattttggccaggcacggtggctcacacctgtaatcccagcactttgggaggcggaggcaggtggatcacttgaggtcaggagttcaagaccagcctggccaacatggtgaaatcccgtgtctctaaaaatacaaaaaaattagccaggcttggtgggaggcacctataatcccagctactcggttggctgagacaggagtatcgcctgaacccaggaggcagaggttgcagtgagccgagatcaggccactgcactctagcctggcaacagaacaagactccatctcaaaaaaaaaaaaaaaaagaaaagagatactttttgcatatcataatactattatcaagtctaagaacattaactaattcggtatcttcttttcagtttatattcgtatttccctaggtgtcccaaaactctgttagaactattaatgtttttgccctgaaccagcatgcatgcagttttatgtccttcaattatatctttttttttttcttttttttttttgaaacggagtcttgctccatcgcccaggctggagtgcagtggcgcaatctcggcagctcactgcaacctccacctgccagggtcaagtaattctcctgcctcagcctcccgaatagctgggactacaggcgcgcacgaccatgcttggctaatttttggtatttttagtagagacggggtttcaccatgctggccaggctggtctcgaactcctgaccttgtgatccgcctgcctcagccttccaaagtgctgggattacaggcataagccaccacgcccagcctcgattatatcttaataagaacggtctctttcctgcctctttgttttgtacatattttttgaagtgtccagggcagttgtcatgtatgatgtcccaccttctgagtttgtccggttgtttgctcctggcattgcctaacttgtgcttagagtgtcccatatcacagacgccatggggcagccgtgcaatggctgaggaaggagatggacccctcctgcttcagtgtttgacttccaccccctctcctgggaccgtctacctggcccagagaagaccctagctctgtgaccttgggcaagtcacttagcctggttttgttttgtttcttcttttgttttttttttttttcttttttttgagacagagtctcgcactgtcacccaggttggagtgcagtggtgtaatcttggctcactgcagcctccgcctcctgggttgaagcaattctcccacctcagccttccgagtagctgggattacaggcacccaccaccacacccagctaatttttgtattgtttagtagagatggagtttcaccatgttggtcaggctggtcttgaactcttgagctcaagtcatccacctgcctcagcctcccaaagtgctgggatcacaggcgtgagccactgtgcttggctcacttagccttttaagcctcatattcctcatcccctcccttgtggggacagggattcattgggacagagcatgttcagtggaagcacaggcccaactcagaggcagcatgagaatgtcagctgggtgcagccatggcggaggagcaggcagcatgtccaggtctcaagggggagttagggcaggccttgccaaggaagcagggctgaggaaagatgaagcccatgttcctgaggtgccatgacgggcagccagtgggtgacaggggtccaggggaccaagggacaccaaggctcagaggaaaggccagggctagggcagagttaagggtgttactacaggaatgagtgaggtggccctggggtggggagggcagtgcagttcaaggttaaaagtaaggactggagccagatgcctgagctcttgtcttagctctgccgcttcctgcttgtgtcactgtgggcagtgacttcacctctctgtgcctcagtgtaaaagcatggttgggagtgccagaaatggaaacacccctccaggtgccagcagagctcctggcgcagggtcagtaggtgttgaccattattactaagaggtccctaggcagagactagatacctccgaaaaggtgggatcgttcagacaaggtagacactgggcaaggcctctgcatcctctgatgtcatctcttccccatccccagatgacttccggatcttctgtggggatctgggcaatgaggtgaacgatgacatcttggcacgcgccttcagccgcttcccatccttccttaaggccaaggtgatccgtgacaagcgcacaggcaagaccaagggctacggcttcgtcagcttcaaggaccccagcgactacgtgcgcgccatgcgtgagatgaatggtgggtgcggcctcccctgggaactgcaggcgcggcaggcgctggcctaagcctgacccgagcctgccttgaaccctctgtctccacagggaagtatgtgggctcgcgccccatcaagcttcgcaagagcatgtggaaggaccggaatctggacgtggtccgcaagaagcagaaggaaaagaagaagctgggcctgagatagggtctgtggccaggcacccgctcccacctggccgggcgctggctcctccctcagttctctttggaaaacccccagctgtccacccatcccctgccccaaaaccagtttcaataaatttacgttcatttccacccctggctgggcatggaagcacgctgtggggagcagggcttggcttccccacagctggaaatggcggggagccttgagagtttacccaggcaaacacccaggcgggggcttctgagcccttcctgcgcacccattccctcttcaaacctcttccacacatgctgagtgctgcttattccagaggagaaaggggggccaatggcaagggtgaagccaagctgaggcccatccccgtgtcctggctacttcctgtgttctcagcaccaaggtaggagatctaggcccttcccttctggagctcacaggcttctaggccctcttccatccagcagactctcaccaagggtctgaacagtgcttgaggacacaatggtgactaaaagtcctgggccctgcaccgttagagctcaaggtccagtgcagaaaataggcccggtgccctgacgataagagcccagagtggtcagggcaggatgggggcgctgacctgtgggtgagggggcccttcctgaaggaaccgtccacccccaagtctcctctggggctttccagcttctccagtctgccatgcccagccagctcaccatgctctaagtctcggtgggcacctctatctctgtctctgtgggtacccctccatttcttgtctctaagcttctatatccctgttggtctctgttctctcccttggagctgggaaatgaaaaaggaggagagacccacagatagagagaacagagacttggggtctgttcccctctcttcccagctccaagctggcctctgcctgtctgaagaggtgtctgtgcagggccttgaatgccaggctgagggcttaagctttacgcagaaggcagcagcaagccccaaaaagctgagaaaattcaagcagcagcaaggtcctgggcagcacagatgtgcgctgtagaaagggccctgtgaccggctgggtgcggtggcgcacgcctgtaatcccagcactttgggaggcaggcagatcacttgaggtcacgagttcgagaccagcctggccaacatagtgaaaccctgtgcctactgaaaaatacaaaaattagttgggcgtggtggcgggcacatgtagtcccagctacttgggagggctgaggcaggagaatcgcttgaacctggtaaaaggaggttgcagtgagctgagatcgcgccactgcactccagccttagtgacagagtgagattctgtctcaaaaaaaaaaaaaaaaaaacgccctgcgaccaccactgtggctggaagtctagaaggctggggcagggactgggccagaggagggagatggcaggtttgagtatggggaggagtggagggtctcccagggacacagccatcggaaccctccattaggagggagcaggttgggcaggactttgtggggcataagtcgggggatggacaataccaaggcctctcagggaccgaggtcccccaggagaggtgtcgaatttctcctgttcctgtcttccccgccttactgccccctctctgacgtcacattttccagtctggtcagagggtgagagcctccctggcaggaagtgccctttagccccctgccacctgggccagaccacccagccccaggatcctcaaagccccttccccccatcactagtcttttctacccctgaccccccttgtactgacagcaagcatagggtcacgggaggagatgggaagagaggatggctccagaaaggacgcttccaaatgcatgtgattctcacttccaagtgggagcagaacagcaggtacacgtggacatgcagagtggggtaacaggcactgcagactccaaaaggtgggagcgtgggggaagctgaacagttaccagttgggtacgttgctcaccattcgggtgcactaaaggcccaggccagtatactggatatactgacatatatccagtaaggaatctgcacttgtaccccctaaatgtttatctttttttttaatgcacacaagtcttcctgagaacaagaagagacacacacacatagaatgtggcaagcagaggtagagatggcgctgtgagcaggaggctcagaggcagagatgagaaccatcagagactgtgcagtgggaagggggacggggagaaaaccaagagacagatggagacggacaaggagatgagataggaacactcaaagacagatggggagggacagagatgtcagaagagaccaggtgacaaagcctcactggagtcaggcccgtggcaacagagacccagctttagatatgccaacctgaagaaagagggcagagagacatggagagacagacaagaggccagcttcaaggatgggaagccaggactcccttcaggcctccgcgctggacggatagagggaccagtgatgctccagggctctgtggcttaccccacactgattccaatcccagtcccactcccactccatgggacccccggtttactttactgtaaaatggaaggaggagcaatgccacccgctctccagaacggcaagtagttaatgatcaagaggctgggctggggactggaagatgccgatatgcaaaagttatttttaatggtaaatattacatacttattaaaatacagcaggatggctgggcacggtggtggctcatgcttctaattacagcactaaggctaaggcaggtggatagcttgaggccaggagtttgagaccagcctggcca[135 bp omitted]aacatggcaaaaccccatctctactaaaaatgcaaaaaattagccgggcatggtggtgcttgcctgtaatcccagctacttggaaggctgaggcaccagaattgcttgaacccgggaggcagaggttgcagtgagctgagatcgcaccactgcactccagcctgggcgacagagtgagactccatctcgaaaaatattttatatatatataggacacccagttattgaattttacgtgaacaattttatagtttaggtatgtcctaaatatttcatgtatgtatgtatatgttacatgtatagctgtggttttttgttgttttttgctgaattatttgagcaagttacagactttttttttgttgtttctttttttgagatgaagtttcgctcttgttccccaggctggagtgcaatggcatgatcttggctcactgcaacctccatctccctggttcaagcaattctcctgcctcagcctcccgagtagctgggattacaagcacccgccaccacgcctggctaattttttgtatttttagtagagacagggtttcac[135 bp omitted]gttcattttctaaatgatatctttcctcctgaataccattatcaaatctaagaaaagaattctatgatatttcatattcagttcatactccagtttccccaattgtcctaaactattacagcgcggaagggcatggggtctggagaaggagagcagtgggaggatgcctgccttaccttcccccttcatcaaatgagagtatgtattgtacttgcctcatagaaggattcaatgaaggggtatggcacagttggtttcacacaatgagccctcatttaatgttggccgttattgctactattgttattgttgaaattgttgatgtcaatattgctatgattggcactcctgggaagcagccccaggacgccctccctactgggcctggtggaggattgggtgggccttcactcctgctccacgcccccgcagttactctgccgattgtgacgtcagctgacgctgggggcgggtgggggaatctggccggaaatccctcttcctgttgcagataagcccagcttagcccagctgaccccagaccctctcccctcactccccccatgtcgcaggatcgagaccctgaggcagacagcccgttcaccaagccccccgccccgcccccatcaccccgtaaacttctcccagcctccgccctgccctcacccagcccgctgttccccaagcctcgctccaagcccacgccacccctgcagcagggcagccccagaggccagcacctatccccgaggctggggtcgaggctcggccccgcccctgcctctgcaacttgagcctggctgcgacccctgctctgacgtctcggaaaattcccccttgcccaggcccttgggggagggggtgcatggtatgaaatggggctgagacccccggctgggggcagaggaacccgccagaggtgagcgatgaactgaggactagatgcctgggtgtctgggttaggaaggacctgggggactagactcccaagaagccgggggcctggactcctgggtctaacagaggaagagagctggggtccctcactcccaggaccaagattttaggctcctggggaaggagggagcggaggcctggactcctggctctgagggaagctagggctggggcccagactccagggcctccaagtgtcaccagctcacccattgccatctggacttttcccgacccagaacattcagaaggccttcatcgcatccatggacctgtggaactgggatgaggcatccccacaggaagtgcctccagggaacaagctggcagggcttggtaggctgccgaggctgccacaacgtgtgtggggagggtgtccaggtggggcctctgctgaccctaaccccttatcgcctgcagaaggagccaaattaggcttctgtttccctgatctggcactccaaggggacacgccgacagcgacagcagagacatgctggaaaggtggctgcgggctgggacccctaagtgctggagaagaagcggggaggctgggatcctagggcaaagggaggaggggggcgtgcctaggttcctgggactgggtggggaggggccgcgtgcttgacccctgagggtgaaggaaaagggggcgcggggtgctgaaatacgggctggggggccataactcccagtccctgacaagtagagactagagagtgggtagttgaggggtctctttcattgctcacagtcctccctaaactcaggtacaagctcatccctggcaagcttcccacagctggactggggctccgcgttactgcacccagaagttccatggggggcgggtgagtgtggggagaggcggtgggaggtggggactggggtcccgaggcaccggggctagaggtgtagactccctgatctttgaggactgagaacacctgcgccctcaaggtggcatgacctggatccgggtcagccgggccccaagtgccagggttgagagcttagaccctagagtttttgagggggcacctgggctcccctcactcgggatccgttactcctcacagagcccgactctcaggctcttccgtggtccggggactggacagacatggcgtgcacagcctgggactcttggagcggcgcctcgcagaccctgggccccgcccctctcggcccgggccccatccccgccgccggctccgaaggcgccgcgggccagaactgcgtccccgtggcgggagaggccacctcgtggtcgcgcgcccaggccgccgggagcaacaccagctgggactgttctgtggggcccgacggcgatacctactggggcagtggcctgggcggggagccgcgcacggactgtaccatttcgtggggcgggcccgcgggcccggactgtaccacctcctggaacccggggctgcatgcgggtggcaccacctctttgaagcggtaccagagctcagctctcaccgtttgctccgaaccgagcccgcagtcggaccgtgccagtttggctcgatgccccaaaactaaccaccgaggtgagagggccgcaaagactgcggggagggcgaagctggagtcctgagccgggacccaggcacctaagggggcggggcccgggagactgacagtgagggggcgggggcttagggaccaggggctcgaaggaggggccggtggcccgcactccaggtccttggggaggagagggctaagaaactggtagtcttatagggaccaaggggatgaggacccaggctcctggattatataaaacgaaagcgataaaggcccagattcctgggtctccgagatggggaggccaaactcctaaatctctgagactggggccctggacgcttgagtctccaaggctgactgttggatctcagagaagggggggcggatccccttctcgggtcctgggtcccgagttgggaggacccggacctctagatcattgaagtggtgtgatctagggccgggaagactgagtgtgcccctcccttcatcccgcaggtcccattcagctgtggcagttcctcctggagctgctccacgacggggcgcgtagcagctgcatccgttggactggcaacagccgcgagttccagctgtgcgaccccaaagaggtggggcagctcccctgcccagccaaatccgccccgtctcttctagttcaatttagctccgcccaagggctaggttcaaccgcgtagccctcggccccgccgctccccggcccactcgaggccccgcccaacccttctcaaacccaatctcccgcctgtactcctgcctcaaccaacccagtctccaccgggctctgcgaggcctcgcccaggtctgcactgcacaccgcccccaggcccggccctccccactatcgccaagccccgccccttcccactccgaccgagcgggcctctgtcctaggtggctcggctgtggggcgagcgcaagagaaagccgggcatgaattacgagaagctgagccggggccttcgctactactatcgccgcgacatcgtgcgcaagagcggggggcgaaagtacacgtaccgcttcgggggccgcgtgcccagcctagcctatccggactgtgcgggaggcggacggggagcagagacacaataaaaattcccggtcaaacctcttcgcgcgtgctcctctgcagcattcttcccgctgatactgactacagcagctagggagcctaagtgtgcagctccacatgttggaatttggcctccccacctcggagacccaggcgtctgggccttcatctctttcctctcacatgatccagaggcctggatccttgctcgctaaaagactgcagtgtcttagtcctcttctccctgaagaccctgaagtgcgggccaccagccccaagtcccttaagctcccaggtccctaagccccgccccacgctgtcagtttccccggtcccgcccccttaggccccgcctctcgactccgccttcactccctccgcaatcttcgcggacctccctcctcggtggttagttttgggatgaggaaccacccacctccagtgctgcgcaatgatcaaaggagacccagactcagggagcctgccatgtgcccgccctgtgatgagagaggcaaagaaactaaacccaaagcccatagggcctactgtgtccctgccctgtgtcgggatttgtaaaggaatcagacccaatcatgagagtatatctgctgtgtccccttgaagagaagactcagaccctgaaaagggcttactgtgctgtgtgtcctcccagtgcaagggatcatcaaagaattaaaactagtgcttgcaccccaacaccactcactctttccccactccaagctggaggacacaggactcagacctacactgtaaagagagcctacgccattctgagagccactgagcccctaaagagagcctgctgtctgtgagcgatgcgggggatacagcagggaccaagacagccctggaccctccccttaaggagctcacagtccagtgggaagacagacccatcatcagagtgttttgacctgggatgagaagactccaggggactgagggaggccaaaaggagagacctgatctagcccaggaggagaagggtcaggggagactccctggaggaggagacagctgatttgagaagtcaggtaggcaaagaatgtttcaggcagaaggaacaacaagatcaaaggcccagaggcagacgatctcataccactgctcaaaactatcagtgtgggccaggcatagtggctcacacctgtaatctcagcattttggaaggctgaggcaggaggatgccttgaggccaggagttccagaccagcctgagcaacataggggagacccccatctctatttaaaaaattaaaaataaacgtggctacagcagcaacagggaccaattcataaaggatctgtgggccgtggtgaggagcctggactttgtctccagggctcctggggagccatcaagggttttgtttgtttgtttgttttttgagatggagtctcactctgtcactctggctggagtgcagtgatgcaatttcagctcactgcaacctccgactcccaggttcaagcaattctcctgcctcagcctcccaaatagctgggattacaggtgcacaccaccacgcacagctaatttttgtatttttagtaaagatggggttgcaccgtgttggtcaggctggtcttgaactcctgacctcaggtgatccgcctgccttggccacccaaagtgctgggattataggagtgagccaccgtgcctggcccccatcaaggggttttaagcagggaaagggatttggattttaggaagatctcattgcaggggatgaatacatgcatgtaaacaggtaattccacaaataatcacaatgttgatggacacagaatgtgtaagaagaggtccctgacccaattccatctggacactgcaccccagatggtatgtgagaggctttagaggccagatgggggaggaaggaaagcagttctctttcatagctccctctcctagtccctagatgcttccttcatttccacaagaaattcttgcattcagcaaatatttatagaccacttcctgtgtgccaggcactgctttagatacaatggtgaatgaataaggcagacaaaaattcttcctttatgataattcttttctgttgag[133 bp omitted]accaacatggacaaaccgcatctctactaaaaatacaaaattagccaggtgtggtggcgcatgcctgtaatcccagctactggggaggctgaggcagaagaatcgctctagctcgggaggtggaggttgcagtgagccaagatcacaccactgcactccagcctgggcaacaagagcaaaactctgtctgaaaaaaaaaaaaaaaaaaaaaaaaaaaaagccaaattggccaggtagggcagctcacgcctgtaatcccagcattttgggaggccgaggtgggcagatcacctgaggtcaggagttcaagaccaacctgaccaacatggtgaaatcccatctctaccaaaaataccaaaattagccgggagtggtggcgtgcgcttgtaatcgcacctactcgggaggctgaggcaggagaatcgcttgaaccgagtagacgcaggttgcagtgagccaagttcgtgccactgcactccagcctgggcgacagagtgagactccgtctctctctctatatatatattttaagggtagggatttttgtgttttgtgcagcgtgctttctcaacccgtaaagtgcctgatggctggatacggtgggtcacgccggtaatcctaacgctttggaaggccgaggcgggaggatcgcttagagaccaggagttcgagtccagcctgggtaacacagcaagaccccatctctataaaatgcatatatatatccaggagtagcggtgcgcatctgtaatcccagctactcgggaggatgaggcgggagaatcgcttgaacccaggaggcggaggttgcagtgagctgagatcgcgctactgcactccagcctgggccatagagtaagaccctgtctcaaaaatttaaaaaaaagaaaaaaaaaatttaaagaaaagaaatacctgacacagaaaaagcgttcaataaatatttcttgcatgaataaaagtactttcgctgggacatttttctccacacctaccctccagccagccccgggatctataacactctctccgagtgaagacacagaggtgatgagatcgggtaacccacgggcgcccgagccccagccgcgcaagctcacgattgggccagaagtgaggatgaacaagcatttagcccaatagaaagtcgtagttctcttgctgggcgtggcttgaatgacttcagtggcctcctcctgggagggagctgaagccgctcgcaagactcccgtagtccccacctctctcagcttccggctggtagtagttccgcttcctgtccgactgtggtgtctttgctgagggtcacattgagctgcaggttgaatccggggtgcctttaggtgagtgtggagggttctgtaacctgggaccccagtctagcgggctgaggagccggaccccagcttccctgagaacgggttgaggcttccggctggcggcgtccggcctccctggaccccggggccctgttctgttcatcgtaagagctaacaatgatacggttcttccttgatgccaggcaacatcccaaacaactttaattaatttatttaactctcccaccagccctatgagatagggcctgcgattatccccttttgtcagtaaacaggctcagagataccaagcgacctagctgaacctacacagcgaccaggatttggcccaggagtttgtcctccagggctcttcatggctaattcacaggcgtggcctctcgcggcttgcctgggccgcagcctggctcccgggtgtccagtccatcctcccttttggacgttggaggggccgcagcgtcatctccgatgcaccctcatcctcagataccgggtagagatctcgccggtaacgatccttcctactgcgtctgtgccccagcagctggtgttttacaccccacttccccaccgaaagactgttttagtgctccagacccccaccaccaccttgcgtcgcttgaatttgacactgctctgcaagtctctgtatagccccacgactcctaggattccctggaatatagatacttttctctcaggctcccgacgaacactgtcacttcttcagagacattatattaaaggtgtttaaccctgggtccgcagagttggtagaattcaaggaatgctagtacttgaattggggtggggggtggaattgcatctgtgtttttactaaccttttgaggcagcaacctcggtagtactagcagcagcggtgattttgttagcaatgaaaatcatagacattccttttttttgtttttctccttttttgagacagggtcactgtgtcacccaggctggcgtgcagtggagaaatcttggctcactgcaacctctgcttccctgtgcaagcgatcctgcctcagtagctgggaccacaggcacgcgccaccacacctggctaattttaatttttttttttttttttgagacaagatcttgctgtatcgcccaggctggagtacaatggcacaatctcggctcactgcaacctccgcctcttgggttcaagtgattctcctgccccagcctccctggtagctgggattacaggtgcacgccaccatgcccagctaattttttgtatttttagtagagatggggtttcaccatattg[134 bp omitted]ccatgttgcccaggctggtcttgaactcctgggctcaagcgatcctcccacctcagcattccaaagtgctgggattacaggtgtgaaccattgtgctccacccaaaatcacaggtattcttataccacattataacagcaaatgtcacaaaatactatattcattcatgattacttcaaaattgtatttttttttttttttgagacagtgtttttgctctgttgcccaggttggagtgcactggcacaatctcggctcactacaacctccgcctcctgggtttaagcgattcttttgcctcaacatccagagtagctgggattataggcacctgccaccacacccagctgatttttatatttttagtagagccagggtttcaccatgttggccaggctggtcttgaactcctgacctcaggtgatccacccccctggcctcccaaagtgctaggattacaggcgtgagccaccgcacccggcgaaaattgtattccttaatgaatcctcagctggatataactgcttttctttgtgatgctgtgcaggtttttttcacttcatgtactcatggagcctatgcaatttttaaatacatttaaacatattcaggccgggtttggtgtctccgttctgtaatctcaacattttgggaggccaagccgggcagatcatttgaggtcagaagttggagagcagtctgaccaacatggtaaaaccttgtctaaaatacaaaaaaattagcagggcatggtggcaggcgcctgtaatctcagctgttcgggaggctgaggcaacagaattgcttgaatcttggaggcggagtttgcagtgagcctaggtcgtaccagtgagcctgggtgacagagcaagactctgtcttaaaaaaagaaaaaaaaaaacattcagcgagaggtttctgggattcatcagactgctgaggagtttgtggcaccaaaaagattaagaatctttgcagtgtagattatgccaacaacggaggcagcccaccagttatttttatgccgtttaaccgtaggaagtcacttagacaccctgttccttcctcgtctgggcaatggtgatagtaatagttcctaccttttagagtggctataggagtaaagtgtgtagaacagcgcctggcatgtagtaagcactcagtgagtgttagctcatgttatttggggaccaggcttgattttgctgaggagttgtaccccaaccctgccgcgacctcgacactcagatgtgtggattcgccctgcccctcatctctgtgtatgttgagaggcaggaacttgttcacacccagcccattgttccgtgcctgccctcttccattgatcctgggtagtctggcttgctcagggcccctggggcccctgctgacacccactcctttcgcctccaggattcagcaccatggcggaagacatggagaccaaaatcaagaactacaagaccgccccttttgacagccgcttccccaaccagaaccagactagaaactgctggcagaactacctgggtaagcaggacctttccctggccacatacctcgagtcactcaccgcttgcctcttcctaggggacccatccaccccagcctcctcccttttattctgaacatccttactctggaaggcccatgcctctcatcacctgctgttcaggtccaggctagggttacaaactttagttcctgcaatgattttttttttaatttaaattttttattattattatggtttggttttgtttttttccagagatggggtctcactttgtcacctaggctggagtgcagtggtgcaatcatagctcactgcagcctcaacctcctgggctcaagaggtccccctacctcagcctctcgagtagctgggaccacaggcccacactactgtacttggctaatttttttgtagagaagaggtctcagtttgttgcccaggctggtctcaaactcttggcttcatgcgctcttcctgcctcagcttctcaaagtgttgggattataggtgtgagccaccgtgcctggcccctacaatgatttttttttaagctgtatgtgtgtgcgtactgtaacatgtacagaaagcacataacaaacatgtacagctaaatgaataattctaaagtgaaccccttgtgcaaccataacctggagagaaaagcagacattgcccacactctcatctccctgccttcttttttttttttttgagatggagttttgctcttgttgcccaggctggagtgcaatggtgcaatcttggctcactgcaacctccgcctcccaggttcaagcaattctcctgcctcagtcccccaagtagctgggattacaggcacctgccaccacacccagctaattttttgtatttttagtagagacggggtttctccatgttggtcaggctggtctcaaactcctgacctcaggtgatccacccgcctcggcctcccaaaatgctgggattacaggcatgagccaccgcgcctggcctccccaccttctttatgtcctgtctggaacacagcaccccgctctccccagtagagaagtgacgccactaactgggggttatcacatctttgtttttggttttggtttttgtttttgagactgagttttttgttttcgttgcccaggctggagtgcaatgtcacgatctcggctcactgcaacctcttctgcctgctgggttcaagcaattctcctgtctcagcctcactagtagctgggattacaggcacccgccaccatgcccagctaattttttgtatttttttttttttttagtaaagacaaggtttcaccatgttgatcaggctgatcttgaactcctgacctcaggtgatccacccacctcagcctcccaaagtgctggaattacaggcgtgagccactgtgcccggcctcacatctttgttttttaccaccatgtttattattttattttattttatatatgttatgttgttatgttattgatggagtctgtttcttgttgcccaagttggagtgcaatggcacgatctcagctcattgcaacctctgcctcccgggttcaagtgattctcctgcctcagcctcctgagtagctgggaatacaggcgctcgccaccacacccagctaatttttttttttttttttttttgagacggagtctcgctttgtcgcccaggttggagtgcagtggtgcaatctcgactcactgcaacctccgcctcccagcttcaagcacttctctgcctcagcctgccgagtagctgggattacagtcgcctgccaccatgcctggctaattttttttttttgtatttttagtagagacagggttttaccatcttggccaggctggtcttaaactcctgacctcgtgatccacccccctcagcctcccaaagtgctgagattacaggtgtaagccaccatgcctggccaattttatttatttatttgagacagagtctcgctctgttgcccaggctggagtgcagtggtacaaccttggctcactgcaacctccgcctcccgggtttaagcaattctcctgcctcagcttcctgagtagctgggactacaggcgcgtgccaccatgcccggctaattttttgtgtttttagtagagacaggatttcaccatgttggccaggctggtctcgatctcctgacctcatgatctgcctgcctcggcctcccaaagtgctgagattacaggcgtgagccaccgtgcctggccaattttttgtattttttttttttttttgagatggagtctcgctctgtcgcccaggctggagtgcagtggcgtgatctcggctccctgcaagctccgcctcctgggttcacaccattctcctgcctcagcctcccgagtagctgggactacaggtgcccgccaccgcgcccagctaattttttgtatttttagtagagatggggtttcaccgtggtctctatctcctgacctcgtgatctgcctgcctcggcctcccaaagtgctgggattacaggcatgagccactaggtccagccacttttttgtatttttaatagagacagggcttcaccatgttgtccaggctggtctcgaactcctaccctcaagtgatccacctgccttagcttcccaaagtgctgggattacaggcctgagccaccatgcccggctaccaccgtgtttagattcacctctttgtgaactttatacatactgtgtgtattcttttgtgtttggattttttcattcagtaccttctcagatccatacatgctgtggcatatagcttgctcattttcattgctgtccagttttctacaatttattctatgcctgtacacttgtgtgatttccattttggagttcttacaaatggtgtggctgtaaacatctttataaatgtaattttgctgggtgcagtggctcacgcctgtaatcctagcactttgggaggccgaggtgggcagatcaagaccagcctggccaacatggcgaaaccctgtctctactaaaaatacaaaaattagctgggcatggtggcaggtgcctgtaatcccagctacttgagaggctgaggcaggagaatcacttgaacccaggaggaggtagaggttgcagtgagctgagatcgcaccactgcactccagcctgagtgacagattgagaccctacctcaaaaaaaaaaaaaaatgtgttccaactcttgatctgggctgacttgaacccctttcttcacagacttccaccgctgtcagaaggcaatgaccgctaaaggaggcgatatctctgtgtgcgaatggtaccagcgtgtgtaccagtccctctgccccacatcctgggtatgtgcctcctgccagggcccttgggatgctggggtggggtcttagcagaggggagtgtggtggcttggtgggagctcatctgtgaggggcagagggaggacagggcaccacactgtcccaggactcagtgcctttcctcccgcctagaattacctccctgtctccttctgctgatgcctctcaaccagtcagggctctcagctgaggcgaccagggtgctttgctagatgtagctcactcatgcactctccaaatacacactcagcactgggctcccatccctgtgtagctcacaattctgtgcagtcctgtccttttttattaggaacatttttttttctttttttttttctttttttttttttagacaagggtcttgctgtgttgccaggctggaaaggctggagtgcagtggcgcgatcttgcctcactgcaacctccgcctcctgggttcaagcgattcccctgcctcagccttccaagtagctgggactacaggtgtgcaccaccatgcccagctagttttttgtattttaatagaaacggggtttcaccatgttagccaggatagtctcaatctcctgacttcatggtccacctgcctcggcctcccagagtgctgggattacaggcgtgaaccaccgtgcccggccctattatgaacattttcaaagcagagataataattcattgacctcaaatacatccatcacccaaagtgaatagttatcaggatttatccacggtttcttcatctaccccttttcgttttcttctttcctttgctgaagtattctaaagcaagtcccagacacgtcatttcacccctgcctacttcagtgtggacttctaaataatgacacagtaagacagtcctttcagccctgatctgaccaaatctgtcgtcaatatttaatagctctttgctatgcccctgccctttgtttaaaaaaaaaaaaaagtttttaaagacaaggtctcatgatgttgcccaggctagactcgaactcctgggctcaagtgttcctcctgtctcagcctcctgagtagcttggactacaggcatgtgccactgtgcctgtctctctctctctctctctctctctctctctctttgtcgccctctcgctctctcttgctctctttctctctcgctctctctttctcactctttctctctttctttcctttctttcttttctttcttgagccttgctctgttgcccagactggagtgcagtagcatgatctcagctcactgcagcctcagcctcctgaatagctgggactacaggcatgagccaccacacctggcccaatttttgtattttttttgtagaaatggggtttcgccttgttgcccagactggtctcgaactcctgagctcaaagcagtctgcctgcctcagcctcccaaagcgctgggattataggcatgagctaccgcacccagctgaatctttcaaaataaaaaaaattaccctttaacttggcaattccacatctagggatgctacaaaaatcttcatgtacaaagatgcccattgcagagttgttcgtaatggagaatatttggaaataacccaagttaaaacattgatcttgatagtctttatggagactatggtgatctacatgctagcacacagaaagaatgctaagacacaggaaaagtaagttgcagaacaatctatatagtaggagtcaatttgcaaggatggagtttttatggtgtggtatgtgtatgtaaataaagtaggcacataccgctggcacttattatgggccagctatgttgttagacctttttttttttttttttttgagatggagtcttgctctgtctcccaggctggagtgcagtggtgcaatctcagctcactgcaacctccgccttccaggttcaggcgattcccctgcctcagcctcccgagtgtctgggattacaggcgcctgccaccatgcccagctgatttttgtatttttagtagagacagagtttcaccatgttggccaggctggtctcaaactcctgacctcaggtgatgcacctgcttcggcctcccaaagttctgggattaccggcgtgagccaccacgcccagccatgttagcactttacatcacataaggtcaacatgctaacacaaccgtatgaggtaggtactattgttagtatcctcattttacaaaattggaaactgaggcccagaaaggttgagtaacttgcccaaagtcacacagctaggaagtgatggagcagggattcagattcagcctctctgttatccatgctttcatccactgttcgttcttgcaccagtggtcctcaccctttttggcaccagggatgagcttcatggaagacagtttttccacagacagggttggggatggtgtaaggatgagtccagcatattacatttattgtccactttatttctgttattattacattatataataaaataattatacaactcaccatactatagaatcagtgggagccctgagcttgttttcctgcaactagatggtcccatctgggggtgatgggagatagtgacagatcatcaggcattagattctcataaggatcatgcagcctagatccctcacatgcgcagttcacaatagggttcgcactcctaagagaatctaatgctgccgctgatctgacaggaggtggaactcaggcagtaatgcgagcattagggagtgcttgtaaatatagttgaagcttgtctcgctcacctgccactcacttccagctgtggggcccagttcctaacaggccacagaccagtacctggtaggcactggttggggctcggggacccctgccttatagcataaaatgtgagcgtgtatgtatataaaaacgtttatgcttgtaactgcttgtgaggtccacaaagagtagagtgttactttcagggagtgttaacttgacataggccttatatgggccttttcattttttttttttttttttttttagagacagtcttgctctgtcaggctggagtgcggtgtgcagtggtagcatcatagctcactgcagcctcgaactcctgggttcaagcagttctcccacctcagcctccctagtagctgtgactacaggtgcatgccaccatgcctggctaagttttgtattttttgtagagacagggttttgccacattcaccaggctggtctcaaactcctgggctcaagcgatcctcccacctttgcctcccaaagtgctggaattataggcgtgagccaccatgcccggcttattttttattttttgtagagatgggggtcttgccgtgttgtccaggttggtctcaaactcctgagctcaagcagtcctcccacatcggccccgcaaagtgctgggatgacaggtgcgagtcaccacacccagcctccatcattgtttatactgagcatcgcctgtggtcagtggtgggattgcactgtgtattgtttggcaccttttttgcacttgactatgtatcttgaagatccatccattcatgccagaacataaatcagcctcgttttttttcacagctgcctgctattccatctcccctgtttggacaaacagcatagtgttgacttgaggttttcaaagcagggcccacccttggagctctgtacagtgacacatctccccatcgacagctctgcagtgggcctggggttttcctgcccattactctcctcccagcatgtcagcttgttcagaacagtgatttctgtcttttggggtcactgctgattccccggcctctagaatagaggttggcacacagcaggtacctgtggatattggttgaacaaacaggtgggcaaagtgaggaagataagaagtccatccgttcagtttccccactgcggagggaataacactgtctttccacaggtcacagactgggatgagcaacgggctgaaggcacgtttcccgggaagatctgaactggctgcatctccctttcctctgtcctccatccttctcccaggatggtgaagggggacctggtacccagtgatccccaccccaggatcctaaatcatgacttacctgctaataaaaactcattggaaaagtgagactatgcgtgtgaacgggccaggcagtggcaagaagctgggctggaatcagtgccctgaccagggaggggcttgaatgagtattttctctgttttgtttttatttatttaatttaatttaattttttttttttttatgatggagtctcgttcttcacgcaggctggagtgcaatggcacgatctctgctcactgcaacctccacctccagtgttcaagcgattctcctgcctcagcctcccgactagctgggactacaggcacaccccaccacacctggctaatttttgtatttttagtagagatggggttttaccatgtcggccaggctggtctcaaactcctgacctcagatgatccacctgcctcggcctcccaaagtgctgggattacaggcatgagccaccatgcctagcgttttttaacttaattttattgaaccttggccaccctctctgtgccagtcaatgagtcaaatagttgattatacagaataacctaagttcctatgtgtgcaaccaccctacataattttaaagcaaattatatagattataatataatataaaatacataaagattatattttatccagaaataagaaactatatgtatctcttggagatacaatttttttttttttttttttgagacagagtctcaatctgttgcccaggctggagtgcagtggtgtcatctcagctctctgcaacctctgccttctgggttcaaactattctcctgcctggagatacctatttttttaacataattatttacacctaagaaattagttcttaatggccgggcacagtggctcatgcctgtaatcccagcactctgggaggctgaggtgggcagatcacctgaggtcaggagttcaagatcagcctgggcaacatggcgaaacctcgtccctactaaaagtacagaattagccaggcatggtagcacatgcctgtaatcccagctactcgggagtctgaggcaggagaatcgcgtgaacctgggaggcagaggatgtggtgagccgagatcatgccattgcactccagcctgggcaacaagagtaaatctccatctcaccaaaaaaaaaaaaaaaaaaaaaaaagagttcttaatatctaataagcaatctcctgcacaatgtgtaacttctccccgtgttgggacctgctctttcatgctgatcatgatggtagttggaagtcatttaagtaggccaagttgagagctgttcttcatggtgcccccaaaagaattgccacacaataacagcccagaatatccccaacagactcgtcaacagggacctagctagcatgaccagccggaacactcttatggctgaattggtgtgtcctcaaaacctttcaaatggccggggtgtggtggctcacacctgtaaccctagcactttgggaggcccaggcgagtgggtcacgaggtcagggattcaagaccagcctggccaagctggtaaaaccccatctcttctaaaaatacaaaaaaaactataaaaatacaaaaattagccaggtgtggtggtgcgtgcccctaatcccagctactggggaggctgaggcaggagaatcacttgaacctgggaggtggaggttgcagtgagctgagatcacaccactgtactccagcctgggcgacagagcgagactccatccccaaaaaacaaaaacaaaacttcaaatggttacaaacttgtctgatgcattcacatgagcagggatgattcttgtatggagaaaaatggccccagagatagatcttgtgaaatagctgctcatgaagaaaagtggctgtaggggccgggcgcggtggctcacgcctgtaatgccagcactttgggagaccgaggcaggcagataacctgaggtcgggagttccagaccagcctgaccaacatggagaaaccccgtctctactaaaaatacaaaatgagccaggcgtggtggtgcatgcctgtaatcccagctactctggatgctgaggcaggagaattgcttgaacccaggaggtggaggttgctgtgacccgagattgtgccattgtactccagcctaggcaacaagagcgaaactccgtctcaaaaaaaaaaaaagtggctgtaaacaggaccttagtgcacacacagggagcttgagggatcgtgggaggttatggcgtgggttggaagtagcaaagaacttaaacaccatgaaaaaaaaattttttttttgaaatggagtcttgctctgttgtccagactggagtgcagtgatgtgatctctgctcactgcaacctccacctcccggttcaagcaattctgcctcagccttccaaaacgctgggattacaggcgcttgccaccacacccagctaattttttgtatttttagtagcgatttagagagtagtttcaccgtgttgaccaggctggtcttgaactccgtgacctcaggttaaccatccacctcggcctcccaaagtgctgggattacaggcatgagccaccacacccagccaacaccatgaaaatttcaaatgaaacaggacggccagtgaaaagtcaaggtgctggactccttgagtccagctgcctgattctgcccagggtttgccaccagtgccagtgtttcctgtacattcctttagagatagctcatgcatctagaagtatttgtaaatatattgatctgattggatatggtgcccttttgctcacacagcccctgccacactggcctcttcagtgcacaggaactgtgagcaaatgtatttcgacacaccaggctggctccaaccccggatcctttacacttgctgtttgctcgacctggaatgtttggccaccagctgtccacaagctcacccctcactgccttcaggtcttcatttagcgaggccttctctgaccactcagccttcaccttcagctcctccatctttgtgccccttcactccttttgtttctttctcttttttcaatttttatttatttttttagtttttggagatggagtctctctgtcaccaggctggagtgcagtggcgcaatctcagctcactgcaacctcagactccctggttcaagcgattcttctgcctcagcctcccaagtagctgggattacaggcacgcgccaccacgcccagctaatttttgtatttttagtagagacggggtttcaccatgttggccaggatggtctccatctcctgactttgtgatccacccagctcggcttcccaaagtgctgggattacaggtgtgagccaccacacctggccttgtttcttaagcacttaccgctaacatgccaaatgttatccttcatcattgcaccactggaatgtaatttccatgcgggcagatttggaaatatatatttaattccccttttcagctttttttttttttttgagataaggtcttactctgtcacctaggctggcatgtagtggcgtaatctcagtttactgcagcctccgccgcccagactcaagccatcctcctacctcagcctcccaagtagctaggaccacaggcatagaccaccatactcagctagttttttgtttgtttgtttgtttttgatagagacggggtttcaccatgttgcccaggctggtctcaactcctgagctcaggtgatctgcccgccttagcctcccaaagtgctgggattacaggcctgagccaccgcacgccagcctgcattttttccaaatgttctaatctttctcattttattatttttttttttttaattttttttttgacacaagacctcactctgtcacccagcctggagtgcagtggcctgatcacagcttactgcagccttgaactcccaggctcaagagatcctcccaccccagcctctcaagtagatgggactacaggcatatgccaccacacccagctaatttttgtattcttttgtagagatggagtttgcccatattgcccaggctgatctccaactcctgggctcaagtgatcctcccgcttcagcctcccaaggtgctgggattacaggcatgagccaccacacccagcccagctgttaatcttattgatgattaattatacgtgatgggtcacttgtcagttgctgctttcaaggttctctttttatcgttcaataatttgattatgatatgtctggtgatggatatctttgagtttatcctatttgaagattattgagcttcttggctctagattgatggtttttttcatcaaattttgggagttttcagccattctttcttcatatattcttttttacccctttctttttgtcctctccttctgggattcccattatttgatgatgtctcacaggtctctgaagttctgttcacttatcttcgtgcttttttctttctgttccttagacttgatcatctcaactgatctatactcacgttcaccgatcttttcttctgcctactcaaatctgttgttgaaccctctattcctctattgaattttttctttttttttttttttgagacggagtctcgctctgtcgcccaagctggagtgcagtggcgcgatctcggctcaccgcaacctccacttcccgagttcaagtgattatcctgcctcagcctcctgagtagctggtactacaggcccataccaccatgcctgattaattttgtgtatttttagtagagacagggtttcaccatgttagccaggatggcctcgatctcctgacctcgtgatctgtccacctcggcctcccaaagtgctgggattacaggcatgagccaccacgcctggcccatttgaattttttcattttagttactgtacttttcaagtcccaagtttctgtttagttcttttaaaataatttctgcttttaggccaggcatggtggctcacacctgtaatcccagcactttgggaggccaaagtgggaggttcacttgaggtcaggagttcaagactagcctggccaacactccatctcaaaaaaaaagacagtattctttagcattagttccgctaatgattggacaaagatttccttagcctccaaaaaccaataatctcctagcctttgctgaggcatggtgggccatgctttcgacattcagccaggcaattgacaactctgccttcgccactacttctcccaggaaggcacacatcctcaaggtcagcccaatgtaagaagactgggttctcatctctggtctttcttgagcctgcatatactcctgggcatgcacacaaccctatgcatgcatgtgaccttctagatttccaagaatattttggagtttttcaaagccttctcattccccagctttatcttttaaactgtttcattagcctattattggcctcaactgttattcattgcttaggcagctgcctagttaaacaattgcatgcaattgtgtttcacaaatgcccctggggaaataattttgacgatgtatgagctctaagttaggtcaaatacagacaacattgcaagtaggggcttccagggaaccataagacgaatcaaataattctgactttctgggagtgaggcttttatggagtttcatcctcttctgccccgtttggtgtatgccaggctgctagtttccactgagaatgctggcagttaatattcaaggctaccatggagctggaatgggggaatggaactaggccaattaaaaatgtcacaaagtataaaaattagccgggcgtggtggcgggcgcctgtaatcctagctactcgggaggctgaggcaggagaattgcttgaacctgggaggcagaggttgcagtgaactgagatcgtgccactgcattccagcctgggcgacagtgagactctgtctcaagaaaacaaaaataaaaataaattttaaaaaagtcataaagttcactgctcttactaagattcagctgcttttcttgaataaacactttacagatttttgttgttgttgtggagacagagtctcactctgtcacccaggctggagagcaatggcacgacctcagctcactgcaacctctgccttcgaggttcaagcgattagctcctgcctcagcctcctgagtagctgggattacaggcacttgccaccacgactggctaattttgtatttttagtagagat[137 bp omitted]caaattaaccattttaatcggaaaacatctcatgtatcttattaccaaaccagtgccttgacgatgggattttcagtgtcatttgccaaattcgcaggcaccgcagtggggagccactgctcccacagcagaggcaatacacggcctagccttggggttgagaagttctggggacggtgtcgggggccctgggccaccatttttgcatggagccagccctgcgctgcgagggcgtggcatcggagagaccgtggcctcgtgggcagcatcggcggcccctggggacacgcgctggctcagtccccacctccgccagggaagcggtctgatgatacccatttcgcagatgggcaaatccacaagccaagtcgtgccgcccagaagaggcagaaccgggatttgaacctaggtttctcattctgcacctgaagaaataaatgtctggtccatgcgtgtgttggggggcgacggggacttttcttcaaccaagcccggtgtgccccctctcattttctagcacgttcttctcccccatctttgcacttatctcagactcccctcacacacctatcctgggtgccatcctttccctcagcccaccgcccatgtagtcagcctcctaagcgccccttccacctgtcccctcatctccccactgctctgcctcggtccagccctggccttggcaggggtccctgcctgggcctccccacgggctcccggcctcacagaggagcagccacctgtgcaaggtcacacagcaggagagacacttctgggattcaggacccacctgtgggtccgaagtggattttttgtttgtttggttttggagacagggcctggctctgtcactcaagctggagtgcaatggcacgatcttggctcactgcaacctctgtccccaggttcagccatcctcccacctcagcctcccaagtagctgggaccacaggcatgagcctggctaattatttttgtattttttatagaaacggggtttcactatgtcacccagtctggtctcaaactactgagctcaagcgatccgcctacctcagtttcccaaagtgctgggattacaggcctgagctaccacgccccgccctgatttggatcttgctcctattcccaggaaggcccatgtcctagcaagagagacaccaggtggtgcgcacgcccctccacctccaactcctccaccgccaacaaagcctgggacccagaggccatgggtcctacacaatctggtatttcaggtctataaatcatgggggtggcagggagcccatcaaagctgttcatccagcctggtctgccggctcagcctcttgtccaccccactgccgtgccccaaaacacacacacacacacacacaccctccctccttcctgggagactagcccaaggaggggcctgggcgtatatagggagccacggtgggtggggctggccagagaggctgcagacagagaaggtgaggagggggccctgggagtctgggtatggcatgaggggtctgaggctcagggaggggcagtgccaagttcaggccagtgactgccccaccggagcccgggtgtcctcttgtgcaaaatgcctccccaccagggctgtgggtacatcagtaccagcctgggccccgcagagagctggagcaacccctcgaagccagggtgtggctcagagatggggggtccggctggccctttacgctcctggcctcatccctgctcatgtgtcccaggatgatggcgtctgcggcagcagcggaggccgagaagggatctccagttgtggtgggcctgctagttgtgggcaatatcattattctggtgagactcgccccagtgctgggagccgagtggttgtgtggtggggaggggacagtcctgagctcggggtgggggatgagggtccagaactgtctctcgggcagactcagtggtcagcacagcctgggttgaaatcccagctctgcctctccccagctctgtgaccttagcaagcgactgtccctctctgtgccttctttcctcatctatagactgtgtcctcattgtgtgggctgttgtcatgtggattaatccatgtgtggccctcagctcagagaaagtgcccgaccaatgctggctatcaccatcagcatcactatggatataaagtgacagcctggtgcacaggaggccacaagaaggaaaaacaacagtgtctttcaattaacattgggttttggttttgtgttttttgttttgttttgttttgttttgttttgttttgttttgtttttgagacggagtctcactctgttgcccaggctggagtgcagtggctgatctcagctaactgcaacctctaactcccgggctcaagtgattctcctgcctcagcctccagaatagctgggattacaggcgcacaccaccacgcccggctaattttttttttttcagacagattctccctttgtcacccaggctgaagtgcagtggcgagatctcggctcactgcatcctccacctcctgggctccagcaattctcctgcctcagcttcccgagcagctgggattacaggcacatgctaccacacccggctactttttgtatttttagaagagatggggtttcaccatgttggccaggctggtcttgaactcctgacctgaggtgatctgcccacctcagcctcccaaagtgttgggattacaggtgtaagccaccgcgactggccgtgtgtttgttttagagacagggtctcactctgttgaccaggctgcagtgcagtggtgtgatgcttgctcactgcagcctccaactcctgggctcaactgatcctcctgcctcagcctcccaagtagctgggactacaggtgcacatcaccacatctagctaatttttttattttttgtagagacggggtctcactattgcccaggctagtctcaaactcctgggctcaagcaatcctcccgcctcggcctcccacaatgctgggactgcaggtgtgagccaccttgcctggcccatttgtaatgtttatggccatggccatgttcccctcctcggggaataacagcactgtcaagggagggcagatggaccaagcatctcctctgtgccagtccactgctccagcctttccacgtggcatccccttttatccccgaagaaactggcagctggggcgtgggggtcggttgtctggctgggctgtctcttctctcctggcctctgctcaccctcatcgctgctcatggaaggcgaggtctttgcccactttactgagagggcagtggaggctccaaatggggagggaacttgctcgtggagatgcctggtgccagggctgctggccccgagcagaccttcctaacccaccgctctgtccagctgtcaggcctgtccctgtttgctgagaccatatgggtgacagccgaccagtaccgtgtatacccactgatgggagtctcaggcaaggatgacgtcttcgctggtgcctggattgccatcttctgcggcttctccttcttcatggtagccagttttggtgtgggtgccgcactctgccgccgccggtccatggtcctcacggtgagactccaggggttgggggatggggacactgaaaacggagttcagcatcactgagtcatagtagcaggtgcagccccagccactagtgtgagttccccatggtgtcacactcagggatcccaggcatcatctcattcagtcttcccacagcccaataacccaggcttgagtagcagagctgggattttttcttttttttttttttggtaaagatgggggtctca[131 bp omitted]tagctgctttccagagtccatgctcatgaactctgccaataatagcacagctaccatttaataatggtttactacaagccacgagctgttctaaatggtttactggattagttcatttattcctcatagtccaccaagagatactgtcatcatcatgaccctgtttgatgaagattgaaactgaggctcagagaagtgaagtcacttatccagggtcacacattgagacaatggcagagccagtttcaacctgagcagatcggctcttgaggctgtgctcttaatctctgcccacaagaataacccatacttcccaagtgtctctcatgcacctgacactagggtaagcagtttagaaaatgagcttcgtggccaggcgcagtggctcatgcctgtaatcccagcacgtggggaggctgaggcggacagatcatttgaggtcgggagtccaagaccagactggccaacatggcgaaatcccatctctaaaaaaaaaaaaaaaaaaaaaattagccacgcatggtggcaggcacctgtaatccccgctactcaggaggctggggcggaagaatcactagaacccgggaggcagaggttgcagtgagccaagatcacaccactgcattccagcctggatgacaaagcgagactccatctcaaaaaaaaggaaagaaaatgagcttcctcaatcttgccagaagcccttcacagctagtgcttttcaacccatttaccagatgaggaaactgaggctcaaagaggctaacagcctctcccaggtgaccaggagagcagggattccaattcacggccccaatgacacagagacagcactgtgtttcctcgacagcagagggtttttcagattcccagaagcagccactcatttgatgaacaaatgcttatgagcaggagctacatgctgagccctacgctgggcactggggctctgtgctgagcgaaacataaaagcccttgacccagggaagtggtgctcagaggaggaagacagtgaacaggaggggaggtcaggagccgaggagggcgagggaagacctcactgccagggaaagcaaagacctagaggcactgggagcgaggcaggtgtgtaactggaggaagagccttccaggtggaggtggcagcaagggcaaaggctctgaggccagagcgggccaggagtccaaagcagctggagctgagtgaggaggaggttggggggtgagaggacatgaggcagacagatggggaggagaacagtgaggaatggggatgggaaagaagcaggagggaaggcaggtgttgtggactttggctttatcctgagtaagatggacccatagaccccctgctcccctcccctcccttcccctccccttccctcccctcccctctccttccttccttccttcgtttttctacacaggcaggtgttgtggactttggctttatcctgagtaagatggagccatggactcctcccctcccctcccctcccctcgcctcctctcccctcccctcccctcctttcccctcccctcccctcctctcccctccccacctccctccttccttccttcatttttctagacaggcaggtattgtggactttggctttatcctgggtacgatggagccatggacttccttcccttccttctttccctccctccctccctccctccctcccttccttccttccttcctttctttgtttctctagacagggtctcactctgttgcccagtttggagtgcagtggcacaatcatagctcattgccacctcgaactcttcatctcaaatgatcctcccacctcagcctcccaatgagctgggactacaagtgtgcatcaccatgtgcagctaatttttgtattttttgtagagatggagtctcactatggtgcccaggctggtctccaactcctggcctcaagtgagcctcccacctcagcctcccaaagtgttggaattacaggcatgagccaccacacctgccctcttattttcttatcctgtatttaattatctggcataacaatttaaccaaagccctaaaaagtcacccaactagttttaaaaattgtgtctgggccgggctcggtggctcacgcctgtaatcccagcagtttgggaggccgaggcaggtggatcacaaggtcaggagatcgagaccttcctggctaacacggtgaaatcccgtctttactaaaaaacaaaaaattaaccaggcgtggtggcgggcgcctgtagtcccagctactcgggaggctgaggcaggagaatggcgtgaacccgggaggcgcagcttgcagtgagcagagatcgcgccactgcactccagcctgggcgacagagcaagactctgtctcaaaaaaaaaaaaaaattgtgtctgtttccccattagtttgtcattaactaagacattttctccccaaatttctttttttttttttttttgagacggagtcttgctcagttgcccaggctggagtgcagtggtgcgatctcggctcactgcaagctccgcctcccgggttcacgccattctcctgcctcagcctcccgagtagctgggactacaggcacctgccaccacgcctggttaatttttttttttgtatttttagtagagatggggtttcgccgtgttagccaggatggtctcgatctcctgacctcgtgatccgcccacctcggcttcccaaagtgctgagattacaggcatgagccaccgtgcccggcccccaaatttcttacaggaaatttctaaagtagactagagtccgcagtatttgagccctgcatacctctcacctgatttcaacaacatcagctgcagactgcccgacattgtctcctctatcccccttctctcatactttttcttctgggtattttgaagcacattctagatgccaagtcacttgcctgtaaatactggagcacacatttctctgagtgataagcacattgttttaaagcagtcaggaggttgtgcaatgtcatccatctcccagcagcagagttcacacatccacacgcaacctcctgctgctttatagatgaaggtgccaggtgaggacatgaaaagaatttgcattaaacatcaactgacaagcttttttttttctcctgccctctgtgccgttggcacaacccaccaaattcaatcaagttcttctatatcttccaatacccagtctgtgtcaaatgtctctgattatctgagaacatcgttttatgttgtttgttttattttaagagacagggtctcactctgttgcccaggctggagtgtaatggcacaatctcggctcattgcaacctctgcctcctgggttcaagctattctcctatctcatcctcctgagtagctgggattacaggcacccatcaccatgcccagctaatttttgtatttttgcatttttagtagatggggtttcaccatattggtcaggctggtcttgaactcctgacctcaggtgatccacccgtctcaacctcccaaagtgttgggattacaggcgtaagccactgcacccacccttgtttgttttgttttaagagacagggttttgctctgttgcccaggcaggaatgcagtggtgcgatcatagctcgctgaggcctccaactactgggctcaaacgatcctccaacctcagcctcccaaatagctaggactaacactaccactagtagtaactatgcttaactaatttttttatttttattttttgtagcgacggggtctca[131 bp omitted]ggtttcaccatgttggccaggctggtctcgaactcctgactcaggtgatcgccccctcggcctcccaaagtgctgggattataggcgtgagccaccacgcctcgcctgtctcaaaaataaattaattaaattaaatatttcaaaatacagaaaagttggaagacaatacagcgaacacctgaacacccaccacatattatagatgctgctagtcacactgccccaaacttttttaaaacttgcatttccccagtgatgcttccctgacggggtgtggcttcacgggctctgcccgacgggccgtcctccctctgtctccccagtacctggtgctcatgctcatcgtctacatcttcgagtgcgcctcctgcatcacgtcctacacccaccgtgactacgtgagcccggcgaggcctggggaggggcctgacctgcatgggaggggcgagggtcccggcgcggcggggcggaggtcgtcctctctccccacccagccctgccggcccttgttcttccctgttctcctcagatggtgtccaacccatccctgatcaccaagcagatgctgaccttctacagcgcggacaccgaccagggccaggagctgacccgcctctgggaccgcgtcatgattgaggtgggcggggtggaccgggtgctgggagggccctgggctccgtccacagaggccgatagagctcccgatgtgccagcttttagaggagtgagtgccttaaagacatccgctcatgagatctctaggagagcagggctgcggtcatcaccgttctgcggatgagtaaacaggcccagaaagggaaagtcccttgcccgaggccacacagtcggtaagtggtgggagctgggattggaacccggcagcctagctcctgacctccctgctcttagcctacacatactacctcaacagaaatgttgataataacaatgatagtaacagcaccattcactgagctaggtttcacactgttcaaaggacttttatttttatattttgagatggggtcttgctctgttgcccaggctggagtgatcatagctcactgcaacctccaactcctgggctcaagtgatcctcccgcctcagcttcccgagtagctgggaatacaggtgcgccccaccacacccggctaagttttttaaattatcttttgtggagatgggggtcttgctctattgcccaggctggtctggaactcctgggctcaggattggagcgattctcccacctccgcctctcaaagtgccgagatcacaggcatgagccacgagtgcctggcctcaaagcacatttttttttttctttttatctttttttttttttttttttttttgagacagagtcttgctctgtcgcccaggctggaatgcagtggcgcgatctcggctcactgcaagctccgcctcccgggttcacgctattctcctgcctcagcctcccgaatagctgggactacaggcgcctgccaccgcgcccagctgattttttgtatttttagtagagatgggtgttagccaggatggtcttgatctcctgaccttgtgatccacctgcctcggcctcccaaagtgctgggattacaggcttgagccaccgtgcccagcctttcaaagcacttttaaagcttttttaatcctcacgaccactccataagggagatcggccttttagtgatgaggagaccaaagcaagaggttgaatatcttgcatgaggtcacacacctggtaggtcacagaactggaaggattcaaactcagacttccaggtttgaagagatacagtcttcctcaaatccaacatgatattgcactggaaaaggaagaaattggctgggtgcagtggctcaaacctataatcccaacactttgggaggcaaaggcgggcagatcacttgagttcaggggttcaagaccatcctggccaacatggtgaaaccctgtctctacaaaaaatacaaaaattagtcaggtgtagtagtgtgcgcctgtgattccagctacttgggaggctgaggcaggagaatcacttgaacccaggagggggaggttgcagtgagccaagatggcgccactgtactccagcctggacaacagagggagactccgtctcaaaaaaaaaaaaaaaaaagaagaagaaattgaggactcaaggaaaactgaggcgtcaatgtggcccaagtcctctagctagccaggatttgaacccatgtttgaagggtgcccaagcctatgttttcctcattcaggagccacaaattaaacacctggattccttaccaaggccaggaaaagccagaaatctgccctttttgtgttattttatcagcatagttgttgataaaaatattttattttattttattttttgagatggagtttcattcttgattcccaggctggagtgcagtggcacgatcttggctcactgcagtcgccacctcccggattcaagcaattctcctgccccagcctctcaagtagctgggattacaggcgcccaccaccacacccggcaaattttgtatttttagtagagacggggtttcatcatgttggtcaggctggtctcgaactcctgacctcaggtgatccatccacctcggcctcccagagagctgggattacaggcgtgagacaccgtgcccggcaaaaatattttaaaataagtcagaggtgcaggtttaatccaaatcccccatcagcctcctggtcctgggacaaatattgtctgcaccgtgctcacacacacagacacccaccggacacactcgcttggaggcccaggacatggggaagttgggcccagctgtgtcaaaggccaatcctgcccctccttgctgtgtgacctcaggcaagcaactgtcctctctgagcccgagcctgcctgaccccctgcttttcactctagcaagaatgctgtggcacatctggtcccatggactgggtgaacttcacgtcagccttccgggcggccactccggaggtggtgttcccctggcccccactgtgctgtcgccggacgggaaacttcatccccctcaacgaggagggctgccgcctggggcacatggactacctgttcaccaaggtgtggccgtctgccctgctccatctgtctatccatctgtctgtcttcctctggtctctgctccctctctgattctctctttctccctccctgtgtctgtccgtctagctttttccctctcctcttcccctctctgattttcttgttttctttttctttctttctttctttctttcttttttttttttcaagaccgagtcctgctctgtcacccaggctggagtacagtggcacaatctcagctcactgcagcgtctgcctcccgggttcaagggattctcccacctcagcttccagagcagctgggattacaggtgcgcaccaccctcttggctagtttttgtatttttagcagagacggggtttgaccatgttgtccaggctggtctcgaactcctgagctcaagtgatccacccacctcagcctcccaaagtgctcagattacaggcgtgagccaccacgctgggtcccctctctgattttctagtgctcccccaactctctctcaagtcagcaggatgcacccagggtctgtctgaaccagacctggcacctacaactttactcaggttgtccgagaataagagcaataatagggccgggcgcgatggctcatgcctgtaatctcagcactttgggaggctgaggagggcagatcacttgaggtcaagagttcgagaccagcctgaccaacatggcgaaaccccatctctactaaaaatgcaaaaattagcccagagcagtagcacgtgcctgtaatcccagctactcgggaggctgaggtaggagaatcacttgaactctggaggtgaaggttgcagtgagccgagattgtgccactgcaccccagcctgggcgacagagtgaaactccatctcaaacaaaaaaaaacaaaacaaaacatcaaacaaaacaatagagctaggcacgggggctcacgactgtaatcccagtactttgggaggccaaggcaggagcatcacttgaggtcagaagctcaagaccagcctgggcaacatatcaagaccccgtctctacaaaaaagtacagaaaattagccaggcgtggtggtgcgcgcctgtaatcccagctactggggaggctaaggcaggaggattgtttgagtctaggaggtcaaggctgcagagagctgtgatggtgccactgcactctagcctaggcaagagacttaaaaaaggcaagagactttaaaaaaaaaaaggccgggcgcgcacagtggctcatgcctgtaatcccagcactttgggagaccgagatgggaggatcacaagatcaggagttcgagaccagcctgaccaacatggtgaaaccccgtctctactaaaaatacaaaaattagccgggcgtagtggtgcacacctgtaatcccagctactcaggaggctgaggcaggagaattgcttgaacgcgggaggtaaaggtttcagtgagccgagatcatgccactgcactgtagcctgggtgacagagggagactgcgagactgtctccaaaaaaaaaaaaaagccagctgtaagatcaaaatcaccctcagattgtcatagccatcagcagggcggcacctacttgtgcagggcctgggttcaacatcagctccctggggccccgaaaccacccgaggaggtggacagtgccatggtccccattgcacaagtgagaaaaccaatgctcagggaaggtggtgactttcccaagggcgcacagtgactctcgctttcagcggctaccctcatgggcgtcttctcaaacttcccccatccccctgcccagggctgcttcgaacacatcggccacgccatcgacagctacacgtggggtatctcgtggtttgggtttgccatcctgatgtggacggtgagaggcggggagcccacaggctgggtgggctgggggtggggggcggagtgccctcatctcgctgcctcctcgccagctcccggtcatgctgatagccatgtatttctacaccatgctctgagggacaggaggggaaggcaacatacacaccccggactcctccgcatcctcctcctgcttcctccgctgggcctggatggctgcctcacctctcacctcccaacgtccctagcccttacgtccttccacttccaagatctttttccaggttcctgagccctactgtgtctcaggtgtgccctgaaaccccagggcttgtgtgcacatatccttagcccatctttcaagggacctctccatgatcccacctcccattcacagatacctctcttgtagctctctgacctcctccttcatggcaggcatcgccattcttgctgaaccgtttgtgattgccatttgagctctggaagcctctattgccatgagagttctgtcacggtcactttactgtccccatcatcacccagcacggggctaagcatatactagatagtcaataaataaataaataatgaatgaatgaatgagtttttt[136 bp omitted]aatggtgagacccccatctctacaaaaatgcaaaaatcagccgggtatggtggcgcacatctgtaatcccagccactccggaggctgaggcagaagaatcacttgaacccgggaggtggaggttgcagtgagctgagatcgcaccattgtactccagcctcggcaacaaatcgaggccctgtctccaaaaacaaaaaaaactattctgatggaagtggtggaaacccaactgtcactgactgaagtgtaaaatggaatttatcagctcacgtaactgagtcaacggggctggcttcaggcatgtctggatccagatgttcaatctaagtttccaggaaacctgcttcattccctgacaggatttctctggcaactccagacttaatgtctttataactaagcaatgcaacagaaggaaagagcctctctcccaagggctgtagccaaggtccagagttgtagccaaggtccagagttgaatctcactgtctcggcttaggttctaggcccttcgttaggttgggaaagggagggcacctggcttggtaatcctgctaaggatgcatgcagtggtggtgttggaaggggagttgtttatcaaaggaaaatccagatacagggctgctgaggcttataggtgataaaaatccttctcctagggatatagcttccagcaagttctctaaggggtccatgacagcaaaccattacgaattgaattatggctgggcactgtggctcacacctgtaatcccagcacttgctgaggtgggcagatcacttgaggccaggaacttgagaccagcctggccaaaatggcgaaaccctatctctattaaaaatacaaaaaagtacctgggcatggtggtgtgcacctgtagacccagctactcaggaggctgaagcacaagaatcgcttgaacccggaaggtggaggttgcagtgagccaagattgcaccactgcactccagcctgggagacagaacaagattccgtctctaaaaaaaaaaaaaagaaccaaattatcactctttgttctccctgaagccacgactaggccttcccaagagggcctgggggcttccttccccatcaaataatttcttggggttcccatttactccagtggtctgcagatagtctttgattgctgaattcagatttcattttttaaaaatatgtaatggataaagaggtcattatttattagagtgaaaaatcggaaactacccaacaaccatcaccaaagggatgggttgtgtaaatcatgttatgcccttggactgaaatgctctgtggctgttgtgtgtgcgcctgtggtcccagctactgggaaggcttaggcgggaggaccgcttgagccctggagttcgaggttgcagtaagctatgttcacacctatgagtagccactgcactccagcctgggcgacacagcaaaattccatctctaaataataataataataggctgagcacggtggctcatgtctgtaatcccagcactttgggatgtccaggtgggaggatcgcttgagccccagagtttaagatcagcctgggcaacatagc[131 bp omitted]ccctgtctctacaaaaaatgcaaaaattatccaggtgtggtgatgcgtgcctgtggtcccagacactggggaggctgagatggaaggatggcttgagcccaggaggcagaggttgcagtgagccgagatcgcaccactgcactccagcctgggtgatagagccagactctgtctcaaaaaaaaaaaaaattaaaaaaattatctgggtgtagtagtgtgtgcctgtggtcctagcttcttaggaggctgagatggaaggactgtctgagcacaggaggtcgaggctgcagtgctccacaccaccacactccagcctggggaacagagcaagaacctgcttcaaataaataaatatatatatatataattataataataaatactttttaaaagagatagctgtatgtgagttgactataaaaagatctcataataactggaaagcccatatgaggatgttcattagtaaaataaatgactatcagcagggcactgggtaaattagctacgctatatccatcctctgcaataccacaaagaggtaaaaataaaaagaacaagaactctgctttaacatggaaaacgcgctaagaaatacatagtaggaaaaattgaaaactatatacagtactttttttttttttgagatggagtttcactcttttgcccaggctagagtgaagtggtgcgatcttggctcactgcaacctctgccccctgtgttcaagcgattctcttgcctcaggctctgagtagctaagattataggcacctgccaccatgcccggctaatttttgtatttttactggagacaggcttcgccatgttggccaggctggtctggaactcccgacctcaggtgatccactcacctcagtctcccaaaatgctaggattacaggtgtgagccatcacacctggcccatatagtactcttattcctgcagggttgatcaaacggagctttagtctttttcttccttaaaaaaatgagttaatgtttttataataatgtttagaagaatagaggaaaaactttgttgttttgcagaacacttttttgttgttgttgttgttgacggagtctcgctctgttgaccaggctgaagttcagtggcacaatcccggctcactgcaacctccgcctcctgggctcaagcaatcctcccctctcagcctcctgagtagctgggactacaggcacgcaccatcacgccccgctaatttttttttttttttttttttttttttgagatggagtctcattctgtcgcccaggctggagtgcagtggcgcaatcttggctcactgcaagctccgcctcccaggttcacgtcattcttccgcctcagcctcccacgtagctgggactacaggtgcccgccaccacacccagataattttttgtatttttagtagagacggggtttcactgtgttagccaggatggtctcgatctcctgacctcatgatccgcccgtcttggcctcccaaagtactgggattataggcgtgagccaccgcgcccggcctgtattttttataaaaatacaaaaaccgttctgcgcctggtagaacacttctttattacagcaatatataaaacaaatataactttaagccgggtgtggtggctcacacctgtaatctcagcactttgggaggccaaaacaggtggatcacctgaggtcaggagtttaagaccagcctgggcaacatggtgaaaccccgtctctactaaaaatacaaaaaattagccaggcatggtggcgggtgcctgaaatcccagctactcaggagactgaggcacaagaatcgctggaacctgggaggggaggtcgcagtgagctgagatcataccactgtactccagcttgggtgacaaagtgagactccatctcaaaaacaaatatatatatatatatatatatataaatttatattatatataaacttaatataactttaaatattcataatgacactatacattatgattgatggtgttagtccactctctcaaatttgagagaatagcttgtagaattcttgaaattcaccaaccttcttcataaagacacaggattgaaatgcatgtgcatgtttttgttaagagcataccaatttcattctcctcagttttgctcataatctccgtattttcatgcaccctcagtgagttagccaaactcaaggccttttattacggaaagggctagcacagttgtggtgacacccttaaaagttaatatccttaaaagttaataactaataagtcaacaacagatttttgacctagctcccttttcctttagagcaaaaagaactttcacctgagcatccagcccaac[140 bp omitted]gtgaaaccccatctctactaaaaatacaaacattagctgggcgtggtggcgggcacctgtaatcccagctacttgggagactgaggcaggagaatcgcttgaacctgggaggaggtggcagtgagccgagattgagccattacactccagcctgggcaacaagagtgaaactccgtctcaaaaaaaaaaagaaaaaaaaaaaacagaactggcagcggggaagggctggaggcagtgtcatcagaggaagatttttggattccaagcacagatgatgatttgtctgtggtcagtttgttttgttcttttcctttctttcttttttttttttttttaagacagagtctcgctgtcacccaggctggagtgcagtggcgtgattttggctcactgcaacctccacctcccaggttcaagcgattctcctgcctcagcctcccaaatagctgggatttacaggtgccccccgacatgcctggcttttttttttttctctgagacagagtttcgctcttgttgcccaggctggagtgcaatggcgagatcttggctcaccacaacctctgtctcccaggttcaagtgattctcctgcctcagcctcccgagtagctgggattacaggcatgcaccaccatgcctggctaattttgtatttttagtatagacaggttttctccatgttggtcaggctggtcttgaactcctgacctcaggggatccacccgccttggcctcccaaagtgctgggattacaggcattagccaccgcacccagcccctggctaatttttgtatttttagtagagatgagttttcgccgtgttggccaggctggtctcaaattcctgacctcaagtgatccacccgcgtcggcctcccagagtgctgggattatgccttctgttgatgatgtcaatcactttttgcggttggtcgtctccttgatctgaataatctgaatccatatcttcgtattctgcccaaaatgcctccactggaagccataaactgggcccaagtccccttcttctcagtggagaatcccaagttgtccaaaaagggctccactgcctcatctcacattttcactctcttggaagacagttcttcagcatatgtggatcccttgataaacgacagcaactcctccaaaacattgtggttgtcagcagaggaaagtcacttctcaggctgcagtgggactgactgactgcctgcctgccgaaaacgaaaacagcggcggcagagagcaggtgccctgggggcgtccttcctgcagctgcagcagacgatgtgctccacctgccttaggtactgcagctccccgtggggcggacagggctcagcatcccgctcctgcgcggcaggacagaggcagtgaggagacagggttagagaccgggtttcaccatgttggccaggctggtctcgaactcctgaccttgtgatctgcccgccttggcctaccaaagtgctgagattacaggcatgagccaccacgcccagccccaaattcataaactttcttaaaacactatgagattttttgcaatttgttttagctcatccactatcgttagtgtattttatgtgtggctgaagacaattcttcttcttctaatgtggcccagggaagccaaaagattggacatcccctttgggaggccgaggcgggtggatcacgaggtcaggagttcgagaccaacctggctaacaaggtgaaatcctgtctctactaaaaatacaaaaaaattagccaaacgtgttggcgggcgcctgtagtcccagctactcgggaggctgaggcaggagaatggcatgaactagggaggcagagcttgcagtgagccaagatggcaccactgcactccagccttggtgacagagcgagactccatctcaaaaaaaaaaaaaaaaaaaaaaagattggacatccctgctttacaacttggtttcttcacctaatcatggattgtggttatctttccaactcagtgaatatgaattcattttacttttttatttttttgagatggagcttcgctcttgtcacccaggctggagtgcaatggcacaatcttggttcactgcaacctctgcctcgcaggttcaagcgattctcctccctcagcctcctgagtagctgggattacaggtgcacgccaccacgcccagctaatttttgtatttttagtagagacggagtttcaccatgttg[136 bp omitted]atattccagagtataaatgtgttacagatcatcatgatctgtttgttgttcagttaataaggcaaggagcaaaacattgtgctaaagtggtctcatttttataaaaattatatctacatatttcccattaagaactcctttgttttattttattttagttcagtttttttgagacaggatgtcctgtcacccaggctggggtgcagtgccacgatctcagctcactgcagccttgacctcccaggctcaggcagtcctcctacctcagcctcatgaggaactgggaccacaggcatctgccaccacgtccagctaaatttttttttattttttgtagacatgaggtctgtgttgcccaggctggtcttaaactcctgggctcaagcgatccttccacctcaggctcccaaagtgctgggattacaggcatgagccaccgcacctggccccatctattactttttcttttcttttcttttccttttctttccttttctcttcttttttttttttttttttttttgagacagggtctcactctgtggcccagactggagtgcagtggtgcgctctcggctcaccaccgcaacctccgtcccacaaggctcaagtgattctcctgcctcagcctcctgagtagctgggattacaggcgcataccactgcagcctggctaatttttgtatttgtagtagagacagggtttcaccatg[136 bp omitted]taaaatactgaacagtatatggctttacttttcaaactagaattcttatatttttaaatttaaatttttttaatttatttatttatttatttattattttgagatggagcctcgttctgttgcccaggccggagtgcaatggagcgatctcagctcactgcaaactccaccacccaggttcaagcgattctcccgcctcagcctcctgagtagctgggattacaggcgcccgccgtcatgcccgactaatttttgtatttttgtagaggcgaggtttcaccatgttggccagactggtcttaaactcctgaccacaggtggtctgccctccttggcctcccaaagtgctgagatttcaggtgtgagccactacagctggcctcaaaccagaatttttaaaacgccacttacatggaatatacacactggattttcccaaacaagagcccctccaggctgacttccctaaatggcttttcagcaggccccggaaagcttctcgccccaccctgggcacacattggaacagcttgtaaacatgtcaaggaaattggggattccatcctcatctgctcataaagtcaggtgtcctcagccaggcgcggtggctcaagcctgtaatctcagcactttgggaggctgaggtaggtggatcacttgaggtcaggagtttgagaccagcctggccaacatggtgaaaccccatttctactaaaaaatacaaaaattagccaggcgtggtggcgggcgcctgtaatcccagctacccaggaggctgaggcaggagaatcacttgaacctgggaggcagaggctgcagtgagccaagatcgcgccattgcactccagcctgggccacagaacgagactcttaatcaaaaaaaaaaagtcagatgtcctcaccagcaagtcgatggtgacttagttgatagtgattgggattctctgagagaagcagagacagcactgacttctcaaaaggcccaccacactgagcctcaatgtgcccctctataaaatgagagttgtaacagtccctatctcatagcatagggccctgttcttttttctttctttctttgtttttttgagacagtgtcacactctgttgcctaggctagactgcagtggtgcaatcacagcttactgcagcctcaacctcccagactcaagtgatcctcctgcgtcagcctcccaagtagctgaaaccataggcatgtggcaccacacctggctatttttttattatttgtagaagcaacagggtctcactatgttgccccagatggtcttaaactcctggcctcaaacggtctttctgcctcggcctcccaaagcactgggattgtaggcatgcaccaccacacccagcttcctattctaagagctcaggaaactgtggactttctaattatgaatcagggatattcttgatcctgtataatcagaaccaaatgcagaaataaacttcctgctgaggctgcaatcgtctctagtgaacctcaatgtcaagtgtttggggcactacccatcctcaacactcaccaaagggaccctcatatatgcatttataaaaataaagtccgggcgcggtggctcatgcctgtaatcccagcactttgggaggctaaggtgggcagatcacttgaggtcaggagatcgagaccagcctggccaacatggtgaaaccccatctctatcaaaaatataaaaaattaggccggtcacggtggctcacacctgtaatcccagcactttgggaggccgaggcgggcggatcacgaggtcaggagattgagaccatcttggctaacacagtgaaaccccgtctctactaaaaatacaaaaaaaaaaaattagctgggtgtggtggtgagtgcctgtacgtagtcccagctactcaggaggctgaggcgagagaatggcgtgaacccgggaggcggagcttgcagtgagcggagatcacgccaccgcactccagcctgggtgacagggcaagactccgtctcaaaaaaaaaaaaaaaaaaattagctaggtatggtggcgggcacctgtagtcccagctactcgggaggctaaggcaggagaattgcttgaacccaagaggtggaggttgcagtgatccaagatcgcaccactgcactccagcctgggcaacagatcaagactccatctcaaaaaaaaaaaaaaaagaaaaaaaaagtcacacttgaaaatgcttggtgcggccgggcatggtggctcatgcctgtaatcccagcactttgggaggccgaggcgggcggatcatgaggtcaggagttcgaaaccagcctaaccaacatggtgaaaccccgtctctactaaaaatacaaaaattagccaggcatggtggtgtgcgcctgtaatctcagctacttgggaggctgaggcaggagcatggcttgaacccgggaggcggaggttgtggtgagctgagattgtgccattgcactccagcctgggcaataagagcaaaactccatctcaaaaagaaaagaaaagaaaatgcttggtgcttttactgtgagatgatgagcccatgaactcagcatatgttagcgtgaatatgtttctggctgaggatctttaaagaatgtttgtggaggccgggtgcagtggctcatgcctctaatcccagcactttgggcagcccaggcgggtggatcacaaggtcaggagttcaaaaccagcctggccaatatggtgaaaccccgtccctactaaaaatacaaaaattagctggacgtggtagcatgtgcctgtagtcctagctgcacaggaggctgaggcaggagaatcccttgaatccaggaggtggaggttgcagtgagccaaaatcgtgccactgcactccaacctgggcaacagagcaagactacgtctcaaaaacaaaacaaaacaaaacaaaacaaaagaatgtttgtggagtttatgccaattgatatgcataaaatcagtttttttcctttattattattatttattttttgagatggagccttgcactgttgcccagactggagtgcagtagtgccatctcggctcactgcaacctccacctcccgggttcaagtgattctcctgccttagcctcccaagtagttgggattacaggcacccgccaccacgcccagctaagtttttgtatttttagtagagatggggtttcacta[140 bp omitted]gagtgcaatggcaggatcatggctcactgcagcctcaaccccccagactcaagcgatcctcctgcttcagcctgccaagtagctgggactacaggtgcataacactataactggctaatttttaaattttttgtagagacggaattttgctgtattgcccaggctgatctcaaactcctaaggctcaagtgattctcctacttcgacttctcaaagtgctgggattataggcatgagccat[136 bp omitted]catggtgaaaccccgtctatactaaaagtacaaaaaaattagccgggtgtagtggtgcacacctgtaatcccaactacccaggagctgaggcacgaaaatcccttgaacccgggaggcggaggttgcagtgagctgacatcattccactggactccagcctggccgacagagcgagactgtctcaaaaaaaaaaaaaaaaaaaaaaaccctgcaaaagaatttaatggcatgaaaaaaatgcttgggaaattgtgacatgagaaaaacagattacaatgtagcatgccaagtatgattccttccctgataaaaatataaatatgtgcatgtttgcattttttttaaaagaaagtcttccaaaggttattgaggaagaggacacatttgcaggggatctttacttcattccttggacattttggtattttgcaaatattttatgatgactattgcctttgtcctctaacaaaaaatcaagaaatatatcttagttaaaatgtccctgctggacataaaatgtacattgagaagagaattatcctactaaatattttcaaactttatctgagcagttaaggtgtccggaattggtgggttattggtctcactgacttcaagaatgaagccgcggaccctcgcggtgagtgttacagctcttaaggtggcgtgtttggagtttgttccttccgatgttcggatgtgtccggagtttcttccttctggtgggttcctggtctcgccggctcaggcaggagtgaagctgcagaccttcgcggtgagtgttactgctcatgaaggcagtatgcacccaaagagtgagcagcagcaggatttatagcaaagagcaaaagaacaaagctaccacagcacggaagggaaccccagcgggttgccgcggctgactcgggcaaccttcttttattctcttatctggccccacccacatcctgctgattggtccattttacagagagccgagtggtctgttttgacagggtgctgattggtgcgtttacaatccctgagctagacacaaaggttctccatgtccccactagattagctagatacagagtgtccacacaaaggttctccaagtccccaccagagtagctggatacagagtgtcgattggtgcattcacaaaccctgagctagacacaggatgctgattggtgtgtttacaaaccttgagctagatacagagtgccgattggtgtatttacaatccctgagctagacataaaggttctccacctccccaccagactcaggagcccagctggcttcacccagtggatcccgcactggggctgcaggtggagctgcctgccagtcccacgccgtgcgcccgcactcctcagcccttgggtggtcgatgggactaggtgccgtggagcaggggcggcgctcgtcggggaggctcaggccgcacaggagcccacggggtacggggagaggggaggctcaggcatggcggtctgcaggtcccaagccctgccccgcgggaaggcagctaaggcccggcgagaaattgagcacagcagctgctggcccaggtgctaagcccctcactgcccggggccggcggggccggccggccgctctgagcgcggggtccaccgggcccacgcccacccggaactcggcgctggcccgcaagcaccgcgcgcagccccggttcccgcctgcgcctctccctccacacctccccgcaagctgagggagccggctccggccttggccagcccagaaaggggcttccacagtgcagcagcgggctgaaggttcctcaagtgctgccaaagtgggagcccaggcaaaggaggcgccgagagcgagcgagggctgtgaggactgccagcacgctgtcacctctcagtaagacaggtcagggctgggcacagtggctcacgcctgtaatcccagcattttgggagctgaggcaggaggattgcttgaggccaggatttccagaccagcctggccaacatagtgagacctcatctctccaaaaaatttaaaaattagctggccatagtggtgcgcacttgtagtaaccgctagtcgggaggctgaggtgggaagatcgcttgaacccaggaggtaggggctgtagtgagctgtgatggtgccactgcattccagcctgggcaatagcaagaccccgtctcaataataataataataggccaggacttgctagatgggaggccggggtttgacctgacctctgacctctgggcagtcaggtaggtaggccgccatctctgacccacatctgccacttggctttcgggctccatcctaccatatacctgcagagtgtggctcagtcagaccggcagcagcgtggcctcacccaggcgggcctgcctgcaggacaggtttgtccgccccagcccccaaactcagaggccggctcctgtgggtaagaggggagcaaagaggtcagggctatgtcagggcccggaccccttgagggacaggcagccatttgatggctgttccccccacaccccaggtgactgcatccctcctcagcctctaaccctccacggctctccagcgccctcctcacctcgcactgagggcccgtgtggcttggccccttgccacctctccaggtatctctttctctctcttgctccactgagccaagctctctctctcaccatctgagatcacagaatggaaataagaaactgtgttatatagcaatcaagccaggcacatgcctctgactacatccacttttgcttacactccttccatgagggcaagttggttctttttttttttttttaactaaaacgtaaaaacacacacccctgccctttcctcaggtgtcccacgcccaccaattcctcctctctggtccccgcgtccttggctggtgttagaaaaatggctacaagcttcctgggaatcagataataaagcttacaggaactcttcccagatttaaaagagcttaataaataaataaataaagcttaccttctagaggggaaaatagataaaaccaataagaaaaacacatgttagaggctaataagtgctaaggagaaaaataaaagaatgaaagacaaaacaaaaacctagccgggcgggggggcgcggtggcttacgcctgtaatcccagcactttaggaggccaaggcgggaggaacgcttgaggagttcgagaccagcctaggctacatagtgagaccctgtctctacaaaacaataaaaaaatttttaaaaatcgctggccatggtggcaagcacctgcatcacagctgctcaggaagcttaggcaggaggatcacttgagtatggcagtcgtcgctgaagtgagccaagatggcaccactgactctgtcagcccagataacagtctcaaaaaaaaaaaaaaaaaaaagatgactgggcatggtggttcacacttgtaatcccagcactttgggaggctgaggcaggcagatcacctgaggtcaggagttcgagaccagcctggctaacatggcgaaaccctgtttctactaaaaatacaaaaattagctagatgtggtggcatgtgcctgtaatccaagctactcaggaggctgagatagaagaatcacttgaacctgggaggtggatgttgtagtgagccaagatcgtgccactgcactccagcctgggtggcagagcaagactccatctcaaaaaacaaaaacaaaacaaaacaaagcaaaaaacggtgagagggcctggtgccccctctggaatgtttttcattgtctaggtttgacactgtgctgtgccatcacgtgtggggctggggaaagtgcagattccggggcacacgcctgcccttggagcagggatggagtcagctccatctatagggtctggtctgggaggagggagagggtgcttgcccagagcaggctcagaccctaagcctgagcctagggaagggtgagccgaccctggaggcaaatggaccacaatcccccctccccatcaaccttcaccagcgattccgggataaatgacacagacagcactgagaattccatggtagtcgttattattactgttgtttttattaatagcaggggccccatcacttacctgtgggttatcaatttattacctctcagttccatttgtcatctggtgccaggttaggctttgtcaatagagggcgctggagagccactgaggagccagggcccctctgcctcactccagggctttgtgttcttcctactgcgctgtgaccagcaggtggctgctatgctccacattatagggagtgacctccactgccaccctctcctccttctccctcctcctcctccctcctcctccctcctccttctccctcctcctcttccttcctcctcctcctccctcttcctcttcctccctcctcttttctttcatccctcttcctttctcctccttcttccttctccttccttcaccctcctcctcttccctcctccttttttctctttctcctcctctttcctcctccgccttcttcctcctcctcctccttcttcctaccccttctcctcccccttcccctttcttttaaaagacggggtctcagccaggcacagtgactcacacctgtaatcccacctgtaatccctcactttgggaggccaagacaggaggatcacttgagcccaggagttcgaggctgcagtgagctatggtagcaccactggactccagcctgggcaatagggggagactttgtctgagagagagagagagagaaaatgagaatcgcaccgtgtcgcccaggctggagtacagtggcaggaccatagctctccagtgccttcttgagtctagctagggacttgtcacttaacccaacagatctatttaaaacatgaagtagaatcattgtttctcacagaatcagctgccttctcagatcctctacaaatggaaacagaatcatgcaaaacagggaaggtaaagggacaagaaaatggtctttttgaagagctgctcccagccctgctggacaaaatgaccaaaataggatccctggtattaaagttcctctcataaaaatccattcagaaaattgaggacactttgggaggctgagatgtgaggattgtttgaggccaggagcctgggcaacagaacaaggccctgtctcaaaaaaaaaaaaaagaaaagatacatatatatatatctgtacccagagtcaagacaagcaatatttgttgtctaaaaacaactctggttcagggtacatcagttaacttttttttttttttttttttgagatggagtctcgctctgtgtcccaggctggagtgcaatggtgcgatctcagctcactgcaagctccacctcctgggttcacgcaattctcctgcctcagcctcccaagtagctgggactacaggcacccgccaccac[134 bp omitted]acccagcctttttttttttgagacaagagtcttgctctgttgcccagtctggagtgcagtggtgcaatctcagcttactacaacctccacctcctgggctcaagtgattttctgcctcagcttcccaagtagctgggattacaggcgtgcgccaccacacctggctaatttttgtactttttgtagagacagggtttcaccatgatggacaggctggtctcgagctcctggcctcaagtgattctcccacctcagcctcccaaagtgctgggattataggtgtaagccaccacgcccagcccaagacagatactttaagaaagtaaactggccaggacagtggctcacacctgtaatcccagcactttgggaggccaaagcaggcaaatcacttgaggtcaggagtttgagagcagcctggccaacatggtgaaacccggccttcactaaaaatacaaaacttagataggcgtggtggcaggcacctctaaatccagctacttggaaggccaaaacagcatcatttgaacccaggagatggaggttgtagcgagccaagatcctgccactgcactgcagcctgggtgacaaaacagggctctgtctcaaaaataaaataaaataaagaaaaagaaaataaagaagggaacttaggttaagtgaggtcataagggtggggccctgatccctgatgtccttatagaaagagacaccaggagtgcacacacacggagggaaggccatatgaggtcacagtgaaaaggtggccttctacaaaccaaggacaaatgcctcaggacaaaccaaccctgctggcaccttgactttggacttccagtctccagaactgtgagaaataaatgtctgttgtttaagccccctagtctgtgatattttgttacacagccctagcagaccattacattcagtctcttctttgcttcccactgtgtcctttctaccaagcaccatgcctagcacatagtaagtacccccaaaaagatgcacaaacatcatcgcctcctgtgggaagctgtccctcacccttctccactccttctccccttagcttaagtgcctcttctcagcttcagttcctacactttccacttggctcttgaagaatatgttttgaggtctaattcctctctagcaggtgaaatgtttgaaggcaggggctgggtcttccccagggctcagcaccaatggcatgcaccatcagaattttttgttttgtttttttgagatggagtttcgctcttgtcacccaggctggagtgcagtgacccaatctcagctcactacaacctctgcctcctaggttcaagcgattcttgtgcctcagcctcctgagtagctgggattacaggcgcccgccaccatgcccggctaatttttgtatttttagtagagatggggttttgccatgctggccaggctggcctccaactcctgacctcaagtgattagccaaccttggcctcccaaagtgctgggattacaggtgtgagccactgcgcctggccaggagtttaataaatatttgagtgaaagtaagtttcttgaccttgacgcatgggccctagagagctagaagacctgaattctaagcttcattcctgtgcaactgtggacactgagcctcaaatgtaatcatggtctggggtttttccagagatcaaagcttggggaaagtcctttgttctctgaaaggtacagggttattttcacatctgttatgaacactcgtgccgttgagctgagctcctgagtcttagtcagctgcctggctccaggtggacttcctgctgtacctcagatatactaagctcactcctgccttggggcttttgcgcttgctactgcttctgggaacacactgcccccaggctttcccatgatcccttaattttcagggtctacaccacagccaaggcagatgacactgattgcaaggaaacaactcggttacagggcattggggaacagaagaaatgccactattcggctcacgcctgtaatcccagcactttaggaggccgaggtaggtggatcacaaggtcaaaagatcgagaccatcctggccaacatggcgaaaacccgtctctactaaatatacaaaaattagctgggcgtggtggcccgcgcctgtagtcccagctactcaggaggctgaggcaggaaaatcgcttgaacccaggaggcagaggttgcagtgagccgagatcgcgccactgcactccagcctggagggcagactccatctcaaaaaaaaaaagaagaagaaataccactgctctattagttcatttaatcccctcaatgactttgagaggtacacactttttttctttttttttgagacaggttctcactctgtcacccaagctggagtgcagtgttgcaatcatggctcactgtagcttctacctcctgggctcaggtgatcctcttacctcagcctccccagtagttgggattacaagtgtgtgccaccacacctggctaatttttgtattttttgtagccatggggattcgccatgttgcacaacctggtcttgaactcctgagtccaagcaatcctctcacctcagcctcccaaagtgctgggattacacatgtgagctaccacgaccgggagtatgtaccttttttttttttttgagatgacgtctcgctccgtcacccaggctggagtgcagtggtgcaatctcagttcactgcaacctccccctcccaggttcaagcgatcctcctgcctcagcctcccgagtagctgggattacaggtgcctgccaccacacccagctaatttttgtatttttagtagagatggggtttcaccgtgttggccaggctggtcttgaactcttgacctcaggtgatctgcctgcctcgttctcccaaagcgctgggattacaggcatgagccactgcactcagccactcagcccttttttttttttttttttttttttgagacatagtctcactctgttgccctggctggagtgcagtggcatgatctcagctcactgcaacctctgccacctgggttcaagcgattctcacgcctcagcctcccgagtagctgggattacaggcttgtatttttagtagagacagggattcaccatgtcggccaagctggtctcgaactcctgacctcaggtgatccgcccacctcggcttcccaaagtgctggaattacaggtgtgagccaccatgcctggccaatatgtactattaatatgcccatttatgatatgaccatttaatatgcccagatgaagagattaaggcccagaggggttaagcaatttgccaaaggtctcacaactagtaaataacagggccaggatatgatgcagacagtttggatccagcattcagctacctaggctgcaaggctctctgcttctcagtgtacagttaagcttagttagtgtaggatctggcatggggagttgctcaataagcaactgaaggcaggggctttttatttatttttctacttctttcagacatttaactctccaaatcttacagtccaaccccccaagccaagccaacaacccttcctataccatcttgccagagcccagggtccctcactccatcttctcatgccttcctggcccataaaaaggattcaataatttgtagtaattagctgggcatgttggcatgtgcctgtagtcccagctcctcagaaggctgaggcaggaggatcgccgaggctaggagtttgaggccacagtgtgctacgatcgcacctgtgaatagccactgcactccagcctgggcaacacagcaagaccccatctctaaaaaaacaaaacacaggaaacctgtattgtagaccagcttattaaaacagaaagaaaataaccaggtgtggtggcacatgcctgtaatcccagctactcgggaggctgagacaggagaatcgcttgaacctgtgaggcagaggttgcagtgagccgagatcgtgccattgcactctagcctgggcaacagagtaagactctgtctcaaaaaaaaaaaaaaggaaaaaatatgaataataaaaaattgtagcaattatcactagggcttctcagtgagaatcagtgagaaactccaaaggttctgaggctgtaaagtatattcccaaccacctttagggtcaaagttgggacaagatgaactaactgtaaataaggcttgttgagtgagaggacttctcaaccaatccaacccaggatctaccagacaagcacttcctgaaggtaatgtggttcaggggtgatctcctgggtcaggcagatctgggtctgaattccagcttcggttactcctcagggagtaaccgaagctggatccgcccgccttggcctcccaaagtgctgggattacaggtgtgagccatcaagcacccagccggttttttttttttttttttttttgagatggagtcttgctgtgtctcccaggctggagtgcagtggcgcaatctcagttcactgcaacctctgcctcccgggttcaagcgattctcctacctcagcctcctgagtagctgggattataggcatgcgccaccatgcccagataacttttgtatttttggtaaagatggggtttcaccacgttggtcaggctggtctcgaactcctgaccttatgacccacccgccttggcctcccaaagtgattggattacaggcgtgagccatcatgcccggcctcgtttcttcatctttcaaataggaaaaacacagtgtgaggtgtgatgaagaactcaggcttggattcaggtcttgcatcattctactccttgctcagccatggactagctgtgtgagctgagatgaggagcttcacctctgtgagccttggctgcctattccaatgcgtgttggcgtcattctgtttcctatagtggctggggattccctgggaccatgtgtgtctgcactgtggtcactgtagttggcaggatggaggcagtgtataaaaatgtttaggagcttaggctctggagtcagactgcaacaggcctagttcaaattccagctctgacaattactcccagtgagatcttaggaaaatcagtttcttctctgaacctgtttttgtttttttgttttgttttgtttgagacggagtcttgctctgttgcccaggcttgagtgcagtggcgcgatctcggctcactgcaacctctgccaggttcaagtgattctcctgcctcagcctccccagtagctgggatcacaggcatgtgccaccatgcccagctaattttttttgtatttttagtagagacagggtttcaccatgttggccaggctggtctcgaactcctggcctcaaaggatccacccgcctcatcctcccaaagtgctgggattacaggcatgagccactgtgccaggccaaacctcagtttttgtatctgtcaaatgagaataataacagtaaatatccgatagagtttactatgaagagtcaatctgatgatgtaggtaaagcacttaaaactggtctggggcctggcacagtggctcgtgcctgtaatcccagtactttgggagtccaaagcaggaggatcccttgagcccaggagtttaagtccagcctgagcaacatagtgagaccatctctacaaaataataataataaataataaattaattaattagtgatgcatggtgttgtgcacctgtagtcccagcgacttgggaggctaatgtgggaggatcctttgaccccaggaggtcaaggctgcagtgagccatgatcctgccactgtgctctagcctgggcaagagagcaagaccctatctcaaaaaaaaaaaaaaaagcaaagatattatgagactgattttttaaatacctttctctaggccaggtgcagtagctcacgcctgtaatcccagcactatgtgaggccgaggcaggaggatcacttgaagtcaggagttcgagaccagcctggccaacatggtgaaaccccgtctctactaaaaatacaaaaattagccgggcatggtggcaggtggctgtaatcccagctactcgggaggctgagacaggaggatggcttgaaccccgggaggtggagattgcagagagctgagatcgcacaactgcactccagcctgggcgacagagcaagactctgtctcaaaaataaataaataaataaataaataaataaaatacctttttgtacatgtcagtccattttcccaaaaccagggccaatgtgatcagaccccatccccatctacaaaatcaatcctacttaatcatagtgtagcttgaaggttgggctctcaccacagcagggttcgagttccagcaatgcccgtaactgctgcgggaccctaaataaacgacttcacctctttgaccctcagaggttaacctggcatagtaatcgcctccctcacggggttatttaggtttcaacgagttgatgcacaagcgtggcacatggaaagggctcggtaaacacgaggtgctattactcccaccacagtgccagtccttctcccttttttactttattttttatttttattttttgagatggagtcttgctctgtcgcccaggctggagcgtagtggcgccatctccgctcactgtaacttccgcctctcgggttcaagcaattcacctgcctgggcctcccgagtagctggggttacaggcatcccccaccacgcccggctaatttttgtatttttagtagagacggggtttcaccat[138 bp omitted]gggacgcctcaggctgtctcggtcaggacctacagctccggttgttgtcccaggctcttccgcgaggtgctctcctgtctcctgaccacccccattcctccccactccagctcctcagcgagcggctgcgaaggacgcgcacaacaacactccgcgcagcgggaaggtaccgaactcgcatcgcagcctgaaactgctcaactaagctcccgccccgctgctctctggtcaatctaaagcgaagacgagccttagggccaatcagaagcgacagcggtggagtcatgcccgcctgcttgaggcgccctggcgtctcattggctatgcttgagaacgaatcccaggctaagccacttagaaaggagcggagccagccaatcagcggtgcaaccgccgcgggggccgggccagaagccccgcagacaagcacctcgggagactggcgaggggcgagctcgcagcttgttagccccgaagccctgcccagggggaaaccctgctggagggagtctaacccccgggccagttaatgttggggcagcgcaatcggccgttccctctgcggtatggttggaggtgggagtgctgacacgtccgcgcgcagttactcctggctgagcatacagtcgaggtggcagtgggaattggaagtgcaagtgtcacgctgccaatcacggggcaaggcactgcccccctcttgtgtctttcctgtccctgtacacttccaggcttccaggcgaggcagagtgagctgtgccagcaatcgtggtggagtgggacaagagagaaaagggagctgttcacaggcaccgaagcctggctggctctttttttttttgagacgccgtctcgctctgtctcccaggctggagtgcagtggcgcgatataggctccctgcaatctccgcctcccggggttcaagcgattcccctgcctcagcctgccgagtagctggaattacaggcgcccgccaccacgctcagctaatttttgtatttttagtagagacggggtttcaccatgttggtcatgctgatctcgaactcctgaccccaggtgatccgccctcctcggcctcccaaagtgctgggttttcaggcgtgagccaccgtgccctgcctggctggctcttttattttatttttatttatttattagagacagggcctcactgtgtcgcccaggctgcagtgcagtggtgtgatcatagctcactgcagcctcgacctcctgggctcaagcgatcctactaccacctggacctctcaaagccctgggattacgggcatgagccaccgtgcctggccttggcttgctcttacgggcctcccagccaatcaggtgtggcggcagcctacacaccccctacacacctcacagatggtaaagggttgagagaaaggtgacagggtttgcaaatgggagctacttagggtggcaaaatagaagcaagaaaggcaggtcaggcacggtgtctcacggctgtagttccagaattttgggaggcccaggtggaaggattgcttgagcccaggagttcgaggctgcagtgagctatgattgcaccattgcaccccagcaccggcaacagagggagac[137 bp omitted]tggtgaaaccccatctctactaaatgtacaaaaaattagccgggcgtgatggcgggcgcctgtagtcccagctacttgggaggctaaggcaggagaatggtgtgagcccgggagtcggagcttgcagtgagcagagatcgcgccactgcactccagcctgggcgacagagcgagactctgtctcaaaaaaaaaaaaaaaaaaaaggacagtagtactcctgagcacttgctgagggagcctccagggctgttcaggtgaaggagaatcagggtccagtctcttcgtggagagagtgggaaaaggcagactccacagcagatcaacgctggggcccggctggaaatcaatgaaatctcagcctaagaggcctgaagcctatggaccaatgagactcaaggctctgccccttcacagccaatcagctgcgggtccgaggcagacgcgcgggagtggcgctgtcctaggtgcctcccaggctgcccagcgtgctcagctggcctgagcgggagaatgcggcccgcgctgcagccaatcagcgtccgcctcaggatccaggggtgaccacgtgcgggagcgttgcgtccctggcctcgctccattccccacttttaacggtcactcggccttaagccgtcctgggtgtatgtgaggctgaaagggaaggaggaacagggtctgggccggtgagtgccatagtttttcttactttactttcttgggcttgggcccggcccaggcaaatctggggtatgggggcttgactggacctcgttgatgattgggaagtgcgggttgagggctttagcccttggggctttcctctgcctttgagaggctggaaatgcagcctcctggccacctttaggcctaggtttggcagaggctaagccagcttgctctctgagttggtccacggcccccgaggccagcctgagtaggaagggtgttgtggggaagttggaggtccttaactctgcatgaggtatggcctccggacaatgagagcttatcaagggtctctggactgagcctggatccgg[144 bp omitted]gagaaaccctgtctctacggggtttctaaaaaaaattacctgggcgtggtggcacacgtccgtaatcccagctactcagaaagctgaggcaggagaatcgcttgaactcattgaactcaggagatgaacgttgcagtgagctgagatcacgccattgcactccagcctgggcgacagaatgagaccctgtctcaagaaaaaaaatgaaaagaaaaaaaaagttatgtaggaagtcactggccaagagatgaaactagtgtgcacatgaaggtttcctggggtctttggagccagcctgggctgggagtgaatgttctggactccaggttgagatgttcttggcagatttcccagtatggagtccaggttggatgatgtggccaagaggttaggccagtaatcctctggagattctagggagaaggattctgaatcccagccgagctgtttgcgctggatgaagtattattgccttgtggtggctctgtacagaactgggattgggtggccaggcgtggtggctcacacctgtaatcccagcactttgggaggctgaggtgggtggatcaccaggtcaggagctcgagaccagcctgaccaacatggtgaaaccctgtctctactaaaaatacaaaaattagccaggtgtggtggcaggtgcctgtaatcccagctactcaggagtctgaggcaggagaatcccttgaacccacgaggcggaggttgcagtgagcagagatcgcaccactgcactccagcctgggcaacagagcaatgctctgtctcaaaaaaaaaaaattaattaaaaaaaaaaaaaagcagggccaggcgtgggggctcacatctataatcccagcactttgagaggccaaggcgggcggattacctgaggtcagaagtttgagaccagcatgaccaacatggagaaaccccatctctactaaaaatacaaaattagctgggcgtggtggcacatgcctgtaatcccagctactagggaggctgaggcaggagaatcgcttgtacctgggaggcggaggttgcggtgagccgagatcgtgccattgcactccagcctgggcaacaagagcgaaactccatctcaaaaaaaaaaaaaaaactggaattgggtcatgtctggagcttttcattctccctgtcccactctttcccatgcctgttctgataattcctagaagatgaagatatcaggctgtaggtgcggggcaggtgcatggggaggatgaacatcgtagtggagcacaggaagaggtgtgtgagatattctcctctttaggaaatcacccaggtttttggcagggcgtggtggctcacacctgtaatcctagcactttgggaggccgaggcaggtggatcacctgaggtcaggagttcaagaccagcctggccaacgtggtgaaaccccatctctactaaaaatgcaaaaaattagccgggcatggtagatgcctgtaatcccagctacttaggagcctgaggtaggagaatcacttgaacccaggaggcagaggttgcagtgagccgagatcgcgccactgcactccagcctgggcaacaagggcaaaactctgtctcaaaaataaataagtaaataacataaaggaaatcacccaggttgtctttactgatgatcttttttatactcatggggcagggtgttgatacctagtttcattcagctgttcagtggtatttatgctttcggagtgccttcagtacacccagagttctttaaccaggggtgagggtgcaaggagtggcttatgagtggacttcaaggaagtctaaccccgaaaccagttaatattggggcagctcaattggccattccctctatggtgtggtgggggcccggggtgctggcacatgaagtgtgcagttaatcccagctcggcagacagccaccaagcatgatggcacatgcctgtaatcccagctactcaggaggctgagatagggggatgacttgagcccaggatgtcaagactgcagtgagccatgattgtgccactgcactccaggctgggtgacagagcaagactgtgtctctaaaaaaaaaaaaaaaaaaaaagaacaattaatggtatgcatgtatattatgaggaggggagggtaaagaataagctagacgatagttaacctctccagccatgaggctcagagtaatctgtcaatctcttgtcatgcattcatatgccaagtggtataagtgtctaccattttctttttttttttttttttcgagatggagtcttagctctgttaccaggctggagtgcagtggtgtgatcttggctcactgcaacctccgcctcccgggtttaagcaattctcctgcctcagcctcccaagtagctgggattacaggcacgtgccaccacgcccagctaatttttgtatttttagtagagacggcatttcacca[139 bp omitted]ggtggctcacacttgtaatccctgcactctgggaggctgaggcgggtggatcacttgaggtcagaagtttgagaccagcctggccaacatggtaaaacctcatctctactaaaaatacaaaaattagccgggtgtcgtggtgcgtgcctgtagtcccagctactcaggaggctgaggcaggagaatctcttgaacctgggaggcagaggttgcactgagccaagatcgtgccactgcactccagtctgggtgacagaaggagactctgtctcaataaaaagaagagttagtcccatgggtgacattctgaacctgatggtgactccctaagagatttagaaccattggaataaagtaggttcctatattatttatggggcctgggcaagatgacagagactccctcgtctcttcccatgcctggtgttggcccatacttcaaggtgtctcacattctagcctgcacatccaagctcagtctacaaatcccttacacaaaatcagggtctagcgtgtgtgtacatcagtcagagtccactctcatgaatacaggcctggggttgagtcctgtgtagggggcctcagagtcatttggtccaggaaatccagggtgctgagttctcagagcatggtccagaagtgaggtgggagctcacagttccgggtaggcactttctagatgccttttgactcagcctatgcgaagggatacagccagaggaggtccaaatgggaccctttgcccaggtttaagtcaacactagtattctgtactggtcttgaaacagcccctgtgaggaaattgagggtcttggaagacttagctccatatgagtgctgaagagaagggccattcactgtgaagggatgcagtgaaacctgttttccaacttctagtctagttctttttccagttaatccacaaagtgtgtgctatgaaggggctagattcagctcacctgggtatgactatagctggttcttggatcatatagagcacaaatttaagggaaaaagggaactaattcactccttgtggtgactcttttctggaagtcttggatgtacttaaccagaaagacggaacatcttttttttcttttttcttttttctttttttttttttgagacagagtttcgctcttgttgctcaggctagagtgcaatggcgcgatctcggctcaccgcaacctccacctcccgggttgaagcgattctcctgcctcagcctctcgagtagctggaattacaggcatgtgccgccacgcccagctaattttttttattttttgtagagacagggtttctccatgttggtcaggctggtcttgaactcccgacctcagatgatccgcttgcctccacctcccagagtgctgggattacaggtgtgagccactgcgcctggcgaaagagtaaacatacttaaagttcatgtaagatttggataatcgctcttaatctatataaaatgctgtggggaatttaaccaccttcatttgtggaaagagatgggttcacgggaagagtggcgagttcacagaatttttctaaattgaatcttgttcaacttggcttgggaagagggcttgatatttaaaataagtgaaatagagggagaactttttcacaaaacaaatgatcatccctcccattggtctattctgatggtttgattttaattataatatttaaggagaattggtatttgtgttgctgtgttgacattgttacatcaagctgggttgtgcctcaagaagttcatgatacaaggatttctgggaagctttgactttgcagccagggtgtgccccgagccccttgcacatttttcccttagtgtcccattggtcaagtctaccagtaagaataagaactatcagatttcaggccaggcgtggtgcctcatgcctgtatcacagcattttgggatgccaaggcgggcagatcatgaggtcaggagttcgagaccagcctggccaacatggtgaaaccctgtctctactaaaaatacaaaaaattagccgggtttggtgatgcacacctgtgatcccagctactcgggaggctgaggcaggagaatcacttgaacccaggaggcggaggttacagtgagccgagattgcgccactgcactccagcctgggcaatagagcaagactctgtctcaaaaaaaaaaaaatcagatttcaaattttattcagtaatacgagtattaggccgggcatgtaggctcacgcctgtaatcccagcactttgtgaagccgaggtgggtggatcacctgacatcaagaatttgagaccagcctggccaacatggtgaaacaccatctctaataaaaatacaaaaaattagtcaggcatggtagcagttgcctgtaatcccagctacttgggaggctgaggcaggagaattgcttgaaccgggaggcggaggttgcagtgagccaagatagcgccattgtactccagcctgggcaacaagagtgaaactctgtctcaaaaaaaaaaagaaagtaatataagtattaaaaaggactgagaggctgatatcatattgccttttatcacatactccccttccaatcatgccctacctaatctctctacctgctctaccctctggcaggacacaggcttgtgtctgcataacctgttgtttctttgctctttccagagagacaactgcagatgattcctaccgagtcagcccaggaagaggaagggggggcaaggtttttgagtctagggagggggagtacttttaagaacagcaacagaccaggcatggtggctcacacctgtaatcccagcagtggatcacctgaggttaggagttcgagaccagcctggctaacatggtgaaaccccatctctactaaaaatacaaaaaaattagccgggtgtgatggtgcatgcccgtaaccccagatacttggaaggctgaggcacaagagtcgcttgaacccagaggcagaggttgcagtgagccgagatggcgccactgcactccagcttgggtgacagaacaagactctgtctcaaaataaaaacaaaacagcaccagcagtgtccctactcttccaagtcaaagtgctgtctgcttctgccatctgtgctcagtgcaggatggcttgggttgcactgtcaagaatgcaggaagaggctagagaagtgctcagggtgtcatcagcataagggttgcagtgcaaagggccctggagataattctaggaggcggtctctaaggggatatccttaggtggggttccccattcttgggggcttttgttcactgaaaggggagttcccttgcccctcctcccttttaggttccccgaaagcccactgatgctccctgtcaactatatttggcttacacagaatgctgccctttgagcagtctccaactctctcgatcatcaatgagcaaaccagcgggggagctgagtcacaagcacatgatgtggggctggaaagcgagggggccacactcagaggggtgaccatgtaatcgtccagacccctgtacctttcctcatccctggggctagtccctcagggctttccgcactccttccttgtcttgagggactctgtatttctgtgttggaggaagggtgtttccctctgcgtacatacatatcagagggactgatgctttatgtgtcttttatatgggtgtggtggtgtgaggaattggaaagctcagaaatggaaaatagttaacgttcagagtagcagatgaacacagctctcacatttgcattttccctttcgttctgactcatcttcccctctccccaccctgttgcccctccaccagcctcacccattgacacaccctgtctgatctaggaagggttaacatgtgcctgcacccatgtggagggaaggcgtggtaggcctggaaagagagagtgggaggctggtctgaacattcgagggtcctggagccaaaggaagaaacgggagcttagggacagtatttgcatctaggaggggacaaggactcttagatccttcccccttaagagaagcctatgggaggccgggcgcaatcccagcactttgggaggccgaggtgggtggctcacttgacatcaggaattcgagaccagcctggccaacatggcgaaaccctgtcactactaaaagtacaaaaattagccgggcgtggtggcgggcgcctgtaatcccagctactcgggaggctgaggcaggagaatcgcttgaacctgggaggcagaggtcgcagtgagctgagattgcgccactgcactccagtctgggagacagagcgagactgcgtctcaaaaaaaaaaaaaaaaaaaaaaaaaaaagagaagcctatggggaagccgactgtgccttgtcaccagagcagcttaccagtacctgacttgtttatcttccagtcatttactgtgtatctaatatacgccaggcacatatcataaatgctttatccgctgggcgcagtggctcacgcctataatcccagcacttcgggaggccaaggcaggcggatcatttgagcccaagagttcaagaccagcctgggtaacatagtgagacccctgtctctaccaaaaattcaaaattagctaggcatggtggctcaaacctgtagtcccagctactcaacaggctgaggtgggaggatcatgtgagcccaggaagctaaggctgcagtgagccgtgatcgtaccactgggcaacagagcaagaccccgtctcaaaataaacatgtcatcaaaatttgttggataaatgaaaattttgctataggatcagggataagagaataataagaaacagaaaaagaaagttgagcctctaagaccccatcccttccccagattaaagagttctgaagtgtgaaaagaggggaaacctccggggaccttgaccccttgggcaggaagtgaaagaaacccaagtcctgatttcagagaaatgtcatttgtcatcagcccaagaaaaggagatttttctcttcgaagaccaccacacgtccttcctggggttgcccctttcagagcttgatgggaggatctgagtcactcacacacccacccccaggtcattcccaggcagcaaatgaggcttcccagtaccaagtcagggagagggaggaggccagcttctggctcctccaccctattcttgggatccaaatgtttcaatcctttttacttctgcagctgtgtgctctgccgtcatctctaagaaacaaccataccactgaatgctactgtgtacttacaaaccacactcatattcgtcacgtcatttcatcttcacccccacctccaaatgaggtaagcagatattatgcctatttcatgaatgaggttactgaggcccagagaagtgacttgcccaaggtgactcaaatagtaaatggcagagatgaaactcaaaggcagggctgattattccaaggtccttgctgccacagatacacttctttgactctaggagttcacaaacgaagtgaggagacaggaggctaggggcagaatgtgtgcattctggaggtagagggggtggtctctcctgcaggcagaaggcagaggcagggttagaaaaccacaccccttcggggggactgtggcagactgatacttgggacatccaatggaggcctgtgaggtcaggggcggggctagctccagggggggccccaggagccccaacagtagttcagagcatgcggtgtcctggaagaagctacaagcggtgagtgatagcctctctccagctgaggccttcttcccatcacaactctttctgtctcctccctgccaacctagagccctctccctgaggtgtccaagtgcagccctccctgccccaagggcccttgctcacagggaacctgcacctaggactctgcctgctgggtgctaagacactgaggttctggttctcttcgtatctgggttcccagctctcttcttaaaagccaatgtggtggttttgatgtgtgagaaactcctgcctggttgggtgctgtctttctattcttcactttttgtcttatgaaaaacaaattaaaccatctccttacccaaatcttgagaggaaacagcctccctgtctccagtccccacgtcctttcctcccatctcctcaggagtccattctccaaaaggtctctccatcattgggtcaggagcctcctctcctgtggcttctgcacctgctctcctctttctctggatgggaatgtctggttccttccctgaggatgtgttctagaagcttcagcttcacagtgatgactgccggatgccttagcgcctgcgctcctgcagccaggatccctatcatgctgccctctctgcctttcaggagcgatgggcttttgggggaggacccactagctttctaagctctcccgtgaaactgtgtcatgctccatcccttagtgccggcgttgactgggttttgtggtgatccttgtctggaatgaagaaagcctggcttgcgcagaggtgtttccctgcagaggggcttggagaagcagaagtggcagtatctgctatcttttacgtcagagactgccaactggcagacttcccgcacgcctgtcttaaacccactactagatatttctgttaactgactggcccttgctctttaagtcctgaatttggtctgatttccattctctcgccaccatgcctacctgctatgattctggataagctccaatcctctcttgggttactttatttgctcactcaggacagagggctctgatctaggaccagcaactcacaccctctcccctcacatccacaggcttgaaatgagatgagatgttcctccctcccctttcaaccatggacctcacactgtggacttcctcttagagcctctgagttaggtacccaagccaaggcacaatgtccctgccccccataagactgcccagcccctatggctctgatcggctggtacagctagcagccaggctccggccagcactctgtgatactctgatcaccgtagggagccaggagttccccgcccacagcctggtgctagcaggtgtcagccagcagctgggccgcaggggccagtgggctctgggagaaggcatcagcccttctacctttgcccagctcctgaactttgtgtatggggagagtgtagagctgcagcctggagagctaaggccccttcaggaggcggccagggccttgggagtgcagtccctggaagaggcatgctggagggctcgaggggacagggctaaaaagccagatccaggcctgaagaaacatcaggaggagccagagaaaccctcaaggaatcctgagagagaactgggggaccctggagagaagcagaaaccagaacaggtttctagaactggtgggagagaacaggagatgttgcacaagcactcgccaccaagaggcagacccgagatggcaggagcaacgcaggaggctcagcaggaacagaccaggtcaaaggagaaacgcctccaagcccctgttggccaaaggggagcagatgggaagcatggagtgctcacgtggttgagggaaaatccagggggctctgaggaaagtctgcgcaagctccctggcccccttcccccagcaggctccctgcaaaccagcgtcacccctaggccctcgtgggctgaggccccttggttggtggggggccagcctgccctgtggagcatcctgctgatgccgcccagatatggcattcccttctaccatagcacccccaccactggagcctggcaggaggtctggcgggaacagaggtgagtggcggggtctagtgctctgcctccaggctgggagggcatggcccaggaggggcagccctgctgggtggaagggcactgcatctctactgcacagttcctgagctggggaagagacaagaagctgctgccacagggcacgccaaagcccagcccccgggggaggacttgggataccccctcttcacgaaggggccaggctcccaggtttagccaaggctgtaactcttccccaccccatcccaggatcccactgtccctaaatgcccccaaagggctctggagccagaaccagttggcctcctccagccctaccccaggtaagcccctcgctgtcctgcatacacctgtaacatggtgtcttctctgggctggggctcgaggagtccagcctgagcagggcccctacctcccactgttccttccaggttccctcccccagggccccgcacagctcagccctggggagatggaagagtctgatcaggggcacacaggtgagtcgggcgggggcactcgtgcctcagccccactgtagcccttgatttcctgcctgaatggtacagtgagttggcgctgggattcctggccctgccctcctttgccttctctgtccccacaggcgcacttgcaacctgtgcgggtcatgaggacaaggcaggctgcccacctcgcccgcaccctcccccggcccctcctgctcggtctcggccctatgcgtgctctgtctgtggaaagaggttttcactcaagcatcagatggagacgcactaccgagtccacacaggtatgggcgccctgccctgtgtgaactgtcggctttcttcccaactccgctcctgagtctccacctgtgtgcccggttcccgcgcaatcccctagccccgtggcccgatccacccctaacttggccagctttcgccgccttcttccttccttcaccggcctccccttccgaccgctctaggagagaagcccttctcctgtagcctttgtcctcagcgctcccgggacttctcggccatgaccaagcacctgcggacacacggggccgctccgtaccgctgctccctgtgcggggccggctgtcccagcctggcctccatgcaggcgcacatgcgcggtcactcgcccagccaactcccgcccggatggaccatccgctccaccttcctctactcctcctcgaggccgtctcggccctcgacctctccctgttgtccttcttcctccaccacctgacggggtgtcggtagcgtcttagccaagagtccaattaaagaacgaaaagcgggccggctcggcttctgacctggcaccgctgctacggcggcctagcaaattccgccccagaagcgccccaggaagggcgccgagtgccctctcctggacgatcgcgggtcgcagaagcccaggccagcgagccctacagagtgaggacactgaagtgtgcaggagcgaaggttaacagtaggggagattgtcgatctcatcaccataataaagagtttcctgtgccctcccttcaggactagaaagccgagtttagtctgtgcacacccccgcccacgccccttgtcctgtagcggcccctggtggccctgcgtccgctgtccagcgggatggacacttcttccacccccgaggcgccccgtcctccccaggaggcagccggccccgaggactcggtgtccgggcacaccttgcggcatgccggtcctggactggtgggggctgtgcgaccgcaagtcactcgccccttccactgcaatccacggcgcgcggagtctgatctgggaacgctcggcccgggagagagaggaacgcgtgctccgaccctgctttcggccacccgcctcctctccgggagcacacggaccccgagaccgcggcctctccggcgtcttccctccacaccgtgccaagccgccgccaggtcgcgcctggaacggagactgactatgctttccaccgctccttctccagcccacgcctcctgcagccgcgaactgcatttcccagggcctcgggggtcccggggcccgagcccgcggcaccctgggagtggtagtccacgcgggccgccggcctagccaagaacaatgggaggagcctggggctaggaccacacctcccggagacccggcaacccgctttccgggtcctggccgggaaccccgccgtcccggccctcgcgccctggctgccggcggaagaagcgaggcgtccggactacatttcccggaggcccccgcggttcgcccctctgcggccgcgacgcgggggtctgtgctccccaggtgcggtccgagggcgccggccggccgcggactccctctcccgtggtgccctgcgcgtggccggcccggcccccggtctcccgcggcggcgctggttgttgtcgtgcgccgcggccgccccgccccgcccccgctctctcccctccccccggccctgcgcacgggccgcccctccccccgcctccccggcccctctcacggtgccaagatggcggcggcggcgggcggcggcagttgccccgggcctggctccgcgcggggccgcttcccgggccggccgcggggcgccggcgggggcgggggccgcggcggacggggcaacggggccgaaagagtgcgggtagctctgcggcgcggcggtggcgcgacggggccgggcggagccgagcccggggaggacacggccctgctccgtttgctggggctccgccggggcctgcgccggctccgccgcctgtgggccggcccgcgggtccagcggggccggggacggggtcggggccggggctggggcccgagtcgaggctgcgtgccggaggaggagagcagtgacggggaatccgacgaggaggtgaggcggttggaggcgtccccggcgccgggtggggcggaggccggggcttccaggggtctgggttgtcccgggggcggcgtgggcaggccgggtcctcagggttccttcggagagacggggcacggagggagggcggctgcatgcagcttccgggggaaagggcctctggaagtgggtagagaagccccggctgcagccaggcactcgcgcccgatgtcggtcccgctgaagtgtcttgggccgatccttttcggcagctggcaaagctagggcggtggaggtttgggcgaggaggcagtggggactgcatgtccagccagtcgtggttgacagcggcagcgtggccttggcagacaggttggagctgtctgggctcttacctgtgggccgccccgccgggcctcgcaacctcctggtttctccagggccccagtttctcttggcatctcaggtagagtggtggagggcttcctcttggggctcgggttgaacaggagtgggatgaaggccgggactgggcactctagcaggtcagagctcagctcaggatttctcccccagcctttcagaacaggcaggaaggtgtgggttgcgttgccctggacggttaataacaacctgagagctcgcagtggagcctgtacgaaagccatctgatgccctccccgccccttcacttgcgggcccctgttcccaacttaatgcagaaataaattgtggcccgaaagggtgtcagtggaggtcccactttggtctgaattggactctgaaggaatctgagtatggggcctgctgcctttcctgaggagaccctgtcgtcttctctcttgggccagtgaaccatggctttggctgtgctggtgtggtccggcactggggatcggagttcgaaatacctggcgcctccatccctagggagagaccctctcttccactacccgcgacctttgagtctttttcgttctttttaaataggcaggggtatgctaagtgggaactggggatattcctcgatacctcagatggaacgagggctttggcactgactgctgtttctcccctccaccccggtcccctaaatcaggagtttcagggttttcattcagatgaagatgtggcccccagttccctgcgctctgcgctccgatcccagcgaggtgagtgacgggggaactccacctctttagcgtcacaggaatttatcctcgcccttcgtgtcagctcttccctgttcaactagcctctgtcagttgccgaatgtgttctgtgttcagagtccaagctagtctgggcagcgggggaaacacacaagcaagacttagtccctgccctcctggagcgccttcctctgtgtgtagggctggcttgatccatctccccacaactattctccttttaggtcgagcgccccgaggtcggggtcgcaagcataagacgaccccccttcctcctcctcgcctagcagatgtggctcctacccccccaaagacccctgcccggaaacggggtgaggaaggcacagaacggatggtgcaggcactgactgaacttctccggcgggcccaggcaccccaagcaccccggagccgggcatgtgagccctccaccccccggcggtctcggggacggcccccaggacggccagcaggcccctgcaggaggaagcagcaagcagtagtggtggcagaagcagctgtgacaatccccaaacctgagcccccacctcctgtggttccagtgaaacatcagactggcagctggaaatgcaaggaggggcccggtccaggacctgggacccccaggcgtggaggacagtcaagccgtggaggccgtggaggcaggggccgcggccgaggtggtgggctcccctttgtgatcaagtttgtttcaagggccaaaaaagtaaagatgggacaattgtccttgggactcgaatcaggtcaaggtcaaggtcaacatgaggaaagttggcaggatgtcccccaaagaagagttggatctggacagggagggagcccttgctggaaaaagcaggaacagaagctggatgacgaggaagaagagaagaaagaagaagaagaaaaagacaaggagggagaagagaaggaagaaagagctgtagctgaggagatgatgccagctgcggaaaaggaagaggcaaagctgccaccaccgcctctgactcctccagccccttcacctcctccacccctcccacccccttcgacatctcctccacccccactctgccctccaccaccacccccagtgtccccaccacctctaccatcccctccaccgcctcctgcccaagaggagcaggaggaatcccctcctcctgtggtcccagctacgtgctccaggaagaggggccggcctcccctgactcccagccagcgggcggagcgggaagctgctcgggcagggccagagggcacctctcctcccactccaacccccagcaccgccacgggaggccctccggaagacagtcccaccgtggcccccaaaagcaccaccttcctgaagaatatccggcagtttattatgcctgtggtgagtgcccgctcctcccgtgtcatcaagacaccccggcgatttatggatgaagacccccccaaacccccaaaggtggaggtctcacctgtcctgcgacctcccattaccacctccccacctgttccccaggagccagcaccagtcccctctccaccacgtgccccaactcctccatctaccccagttccactccctgagaagagacggtccatcctaagggaacccacatttcgctggacctcactgacccgggagctgccccctcctcccccagcccctccacctcccccggccccctccccaccccctgctcctgccacctcctcccggaggcccctactccttcgggcccctcagtttaccccaagcgaagcccacctgaagatctacgaatcggtgcttactcctcctcctcttggggctcctgaagcccctgagccagagcctcctcctgccgatgactctccagctgagcctgagcctcgggcagtgggccgcaccaaccacctcagcctgcctcgattcgcccctgtggtcaccactcctgttaaggccgaggtgtcccctcacggggctccagctctgagcaacgggccacagacacaggctcagctactgcagcccctgcaggccttgcaaacccagctcctgccccaggcactaccgccaccacagccacagctgcagccaccgccgtcaccacagcagatgcctcccctggaaaaagcccggattgcgggcgtgggttccttgccgctgtctggggtagaggagaagatgttcagcctcctcaagagagccaaagtgcagctattcaagatcgatcagcagcagcagcagaaggtggcagcttccatgccggtgagtgtggtccctgggcccagcggcacacccagccatccagcctccattctttgcaaccccctaaccttccgcctccttggacactttccagcattgcggggaaccctcagaacctgcctttctgtgatcccccaccttcctttgttcctccccagacctggcccttctctgtgctagttccctgtccctatcttccttttttttttttttttatttttgagaccgagtctcactttgtccaggctggagtgcagtggcgtgatctcggctcactgcagcctttgcctcccgggttcaagagattctcctgcctcagtctctcgagtagctgggactacaggtgcccatcaccacgcctggctaatttttgtatttttagtagagacagggtttcaccacattggctaggctggtcttgaactcctgacctcgtgatctgcccgtctcggcctcccaaagtgctgggattacaggcatcagccaccacacccagctccctgtccctatctttcctcactgtccagcccctgaccctgtttattccctgccagctgagccctggagggcagatggaggaggtggccggggctgtcaagcagatctccgacagaggccctgtccggtctgaagatgagtcggtggaagctaagagagagcggccctcagtatgcatcgggaggagggccctgaagaagactggcgggaggagtggggctgcgggagcgcaagctgcccacacacactccgatttctcccccagggtcccgagtcccctgtgcaaggtccccgcatcaaacatgtctgccgtcatgctgctgtggccctgggtcaggcccgggccatggtgcctgaagatgtccctcgcctcagtgccctccctctccgggatcggcaggacctcgccacagagggtaggtggggagactggacagccatgtcaggtttggggatgaccccacacttgggtgacatgcaccaagagcctaggagagagggagccaagtcaggtgctcaggggttaggtggcaagtgggctggagtgctaggtcctagagcaacttcatttgggggcaccaggaacctggcgctgtgagaaagcgagagccaggttgtgggaaagcagggaagtgaggtagaagcctggtggctttgtggctccatcccctcctccctgcctgctgcaatagatacatcatcggcgtccgagactgagagtgtcccgtcacggtcccggcggggaaaggtggaggcagcaggccctgggggagaatcagagcccacaggttctggagggaccctggcccacacaccccggcgctcactgccctcccatcacggcaagaagatgcgcatggctcgatgtggacactgtcggggctgcctacgtgtgcaggactgtgggtcctgtgtcaactgcctagacaagcccaagtttgggggccctaacaccaagaagcagtgctgtgtgtgagtagctggggcgtgacctcattcccgtggttgttggtcccctaggcttcctacctcactcctcttctgcctggccagagcagtggggttggcattcttgtggagagcttcctctcttcccccagaccaccagtcccctaccctggtgacgtgctgctcccctccccagataccggaagtgtgacaaaatagaggctcggaagatggaacgactggctaaaaaaggtgacgagctttaaggagcatttcttctcaaaaccgtgttagagtttgtgctgtggagggagctgtttttctttgctctcctcccttgcagctcaccctctccatcttctccgttgtgtgctttcatagctcctgcgttcattccctgccccgcttctttctggcttctctcccagtgtcccatgtccctggctgagctcaaatcctactaagtcccctgttcccgcaggccggacgatagtgaagacgctgttgccctgggattccgatgaatctcctgaggcctcccctggtcctccaggcccacgccggggggcgggagctggggggccccgggaggaggtggtggcccacccagggcccgaggagcaggactccctcctgcagcgcaagtcagctcggcgctgcgtcaaacagcgaccctcctatgatatcttcgaggattcggatgactcggagcccgggggcccccctgctcctcggcgtcggaccccccgagaaaatggtgcgaactgcttaatgctttctctgttgatcatttatttggtcttgtgtcttttgtgtaggagggacaaggcacccagacccagggctctgtcagtctgatagagaaggtggctgagggcggaggaggagacagtttttaggtggatgtacagaactggcctatgaggttctcagtgagcctaatgagtgagacttaagggtcatcctaggcctggtgcagtggctcacacttgtaatcccagcacttttgggaggccaaggtgggaggatcacttgagcccaggagttcaagaccagcctgggcaacatagtgggaccccatccctataaaagcaaaagttagttgtatgtggtggcacgcatctgtggtctcagctgctcaggaggctgaggcaggaggatcgtctgagcctgggagttcaaggctgcggtgggctatgggtcacgccactgcattccagtctgggcaacagagcgagaccctgcctcaaaaaacaagaaaaagaatcgtcctggcgggtcttggttagttaaagaaggccctgggaatccaggtaacatttggggttgtagaagaagaggggcgtggaaggggagtgacctcactgctcattgtgtcctgcctagagctgccactgccagaacctgaggagcagagccggccccgcaaacctaccctgcagcctgtgttgcagctcaaggcccgaaggcgcctggacaaggtcagcacggcccgctccgagagccccttccctccaggagctacctggcaagtcagagtgacagacacacctgagtgtcgtggtgtgtccacatgagaggacaggccctgagggatgaggcgggccttgcctgtctggaaagcaaaggggtctggatcagggtctgggtccagtaggctgggggaaaggcggtgaggagaggagtctgcatcacggccaggctggcagctctgaattcccccacctttcctccccaggatgctttggcccctggcccctttgcttcttttcccaatggctggactggaaagcagaagtctcccgatggtgtgcaccgcgtccgtgtggattttaaggtatggcattgagtggggcgagtcacagagcctctggttggaagaacctcgatgactgtgtcatcgagaagccaggtgggtctgccttgtatgcctggcggccctctgatcctgcatcctctcttcccccaggaggattgtgatttagagaacgtgtggctgatggggggcctgagtgtgctcacctctgtgccagggggccccccgatggtgtgcttgctgtgtgccagcaaaggactccacgaggttagatctctgcctttcttcacagacccccagctctctgtcggtcctcacggcctgattccttgggccctctcagctgggtctcatcccttggccctctggcctcatgctatgcccatcattcactcctttaccctgtccccagctggtgttctgtcaagtctgctgtgacccattccacccattctgcctggaggaggccgagcggcccctgccccagcatcacgacacctggtgctgccgtcgctgcaaattctgccacgtctgtggacgcaaaggtcgtggatccaaggtttgggcccaagggctggccagggtgggtggaggcctgaaggtgagggcatccctgtgccagcaggtttcgccatctctgtctccacatccaacagcacctcctggagtgcgagcgctgccgccatgcataccacccggcctgtctggggcccagctatccaacccgggccacgcgcaaacggcgccactgggtgagagatgaggttcacccacttgctttgtctctaatgaatatcaccaccacccccaaacttgctctaggctggggctctcaggaggagcagaggttggggatcctcttaagaattgattagtaatgtttcctcttcaaaaatttcacataggtcagatttatattcagaatttgcatggagtggttttaggggcttatgaatctcacattccgtgggctcagaatcccctgctatagcctgatgtcctctcctgccctcatgttcctcctccgtgtctgtcctgcgtgttttctcctcttacctgtccctccttgcctgcttcctgcatatccccaattcctcctcgcccgtctcccgctcatgttgctccagtccagtgcctggttttcccctaacatcgccctgctcccccagatctgttcagcctgtgtgcgctgtaagagctgtggggcaactccaggcaagaactgggacgtcgagtggtctggagattacagcctctgccccaggtgcacccagctatatgagaaaggtggggaccgggcaggggaactggatgctgggggccacaggggaatggccaggctcttttacaggctttagcacagaccctcttttctcatggctttccaccttgtagctatgggactatctcttcaactcagggaactcttccacaggagtccatccagtatgtaaaacagggacacatagctcctctgagggtggtgggagtggaaggcctgggaccccactgtcttggtgtctgaggtacttcctggaacctcacgtctccattgagcggtttggaagccttattcaggcagtacattagcaaggccctgtgttctgcagagtctgaaaagaggcctcatcctaaggccgagcacagtggctcacgcctgtaatcctaacactttggaaggctgaggcaggtggatcacctgaggtgaggagtttgagatcagcctggccaacatggtgaaaccccatctgtactacaaatacaaaaattagccgggcatgatggcgggcacctgtaatctcagctactcgggaggctgaggcaggagaatcgcttgaacccgggaggcggaggttgcagtgagcggagatcttgccactgcactctagcctgggtgacagagcaagacactgtctcaaaaaaaaaaaaaaaaaaaaagcctcatcctcaaggagcttttagggactagtaggggcccaaaacaggggcatagtggaggcagctaaggtactgctaatccttgaacagagacactcagggctgagtgggaactccagcacctctgactccttctcttccctttctctaggaaactactgcccgatctgtacacgctgctatgaagacaacgactatgagagcaagatgatgcagtgcgcacagtgcgatcactgggtgcatgccaagtgcgaggggctctcaggtgagtcagtggagcacctgggctgcagcctcaaccctgtggggacccctgcccccaccacaggccccaagaggactggtgggctaagggtccttgctggcctaggggctgctgggagccctcacatcctctgaaaccacttttccctttcccacttggctatcctagatgaagactacgagatcctttcaggactgccagactcggtgctgtacacctgcggaccgtgtgctggggcagcgcagccccgctggcgagaggccctgagcggggccctccaggggggcctgcgccaggtgctccagggcctgctgagctccaaggtggtgggcccactgctgctctgcacccaggtctggagggccctggaggcaggatgggccggggctaggcccacccccagccctgctaacttccccgctttgcagtgtgggccagatgggaagcaactgcacccaggaccctgcggcctgcaagctgtgagtcagcgcttcgaggatggccactacaagtctgtggtgagtggtacaccaggaggagcaggtgggtggcaggaggagagggctggaattgtgcagaggggactcagtctctgacaaacccccttacagcacagcttcatggaggacatggtgggcatcctcatgcggcactcggaggagggagagaccccggaccgccgggctggaggccagatgaaggggctcctgctgaaggtgagctcttccggggatgcttgtggggtgggggagtgggaccttcagaccctgcccctgccagctctcctggggaagctggctcttctcatcctgttaacccactccccagctgctagaatctgcgttcggctggttcgacgcccacgaccccaagtactggcgacggagtacccggctgccaaagtgagcaaggctgggtagcagaagggaagccggggagtgagggcaaggccagggcatgcaggggccacgctgggctgagaagagatgagcagaggtagggtctggagcagagctggagaggagggtggtggaacccaggtgagattccctggtggttctagactagcaaagctttgtttctgctttgtgcaggggaatgctggggacaaagcagtgagcgaatcagattgggctctgcttaaagagctcattgtggagccgggcaggcactgaagacccagatggtcagggcagtgatggagaataccagggggcggtgggggcccggaggggtacctgctggagccgaggtgtcagggaaggcttcctgaaagagatggcattggagcagagctggggaggaagagtattgcaggcatgaggagcagcatttcgtatgtccaagctggcacaagagggcctggcttatttggtggactgagagaaattccacatagagagggagtagcgggtgtcatggcgagttcaggctggtttgtggatgggcccccgttcagctgcccttgttgggcacatcagctgctaaccctgcctgtccacagcggagtccttcccaatgcggtgttgcccccatccctggatcatgtctatgcgcagtggagacagcaggaaccagagaccccagaatcagggcagcctccaggggatccctcagcaggtactgggaagtgggggtccagaagccagggccctgtgttggtggcctggctccgggtcctgattcttagacctcccttcacatttcctcttcagcattccagggcaaggatccggctgccttctcacacctggaggacccccgtcagtgtgcactctgcctcaaatacggggatgcagactccaaggtgagggctgctctgtgacgcaccaggttgtggggcctgttccctggcctccccacatcatgccactcctcttctgccccaggaggcggggcggctcttgtacatcgggcagaacgagtggacacacgtcaactgtgccatctggtcggcggaagtcttcgaggagaacgacggctccctcaagaatgtgcatgctgctgtggcccgagggaggcagatggtgagggcgcgggcgcagagaggtggacagctctctggctcttggggaggcctcctccggtgcaaacagctcttacttcacattccctacctggcatcctttcactgccaggctgaggtctcttggttgccctgggacgttggtgctgatggcagctttttcctatgtgggccctctggctgtaatctgggcctgaagtgtgggagtctaaaagtgagaagagtgcccattgattgaacctgggctgcacgctttccatgctgggtggcgttgagctctcactacatccccgtgaggttagaattcccccactcctcacagtggtgcctgggccaggtacagagagacctcaggcactctcgggcattggggtggtagagattcccactgcgggggtatctgtgaggatgaaaataacacaacctccgcctgaaaactgtgacaaagataatcacactaatgctatcagcaagtattgtcattcttgcttcaaagaaccagagagagtttggtgtgcacctgggcctggatgcggctggggagaggctgcgcctagggagagcctttgccgtgccaggctagacagggacccatgcagactcagtgacagtggtgcctggcgcccagccccagccctggcttctcccctgagctgccctcccctacgcagcgctgcgagctctgcctgaagcctggcgccacggtgggctgctgcctgtcctcctgcctcagcaacttccacttcatgtgtgcccgggccagctactgcatcttccaggatgacaagaaagtcttctgccagaaacacactgatctcctggatggcaaggtgggccagaactgtggggtacacggttccttccccacctctcttcctgttcacttagggacccccgtggcccccaggcctggccctactgcctctcagtgtctcctcatctgttttcccagaggcctttaggccaagcccctgactgttcagacttccctggcatccacctcccccaccaatgcagccacctcactttgccaccccctcttccaggaaattgtgaaccccgatggttttgatgttctccgccgagtctatgtggacttcgagggcatcaacttcaagcggaagttcttgacggggcttgaacccgatgccatcaacgtgctcattggtaagctgcctgctctccgccctgtcctcctaccctgtcctgcctgcctctcctgacctccgctttgcaccacaggttccatccgcattgactccctgggtactctgtctgatctctcggactgcgagggacggctcttccccattggctaccagtgagcggtcggggtgatccatggggccaggggactccatagctggatcccatttcccaagcatcctaaccgtcttatcccacatgccaggtgctcccgtctgtactggagcacagtggatgctcggaggcgctgctggtatcggtgccgaattctggagtatcggccatgggggccgagggaagagccagctcacctggaggctgcagaggagaaccagaccattgtgcacagccccgccccttcctcaggtgtggctttggctctgtcttcttcctgaataccgctctccctaaacaaacctacagatctctgttccccgctcccttttggaaagtccaggaggcttgcttttgcttcagttgctgtaatgtaacggcagctcgcttactgccatgccttgtgtgccaggggctgtgcccggcttttcatgggaagtgaggtggggagagcggcacgctgcctacttgaggtggggtactggcttttggacgactgcagggagtagagtgcttacagctccctaacttggggcactgtgctcatggagcgctctccagtgtcgccatactacaccttgaaggggacagtggctgaacacagtaacatgctagggaagctggaattggaactgcatctgctcagctcccaaaccggcccccttacagccacactggctgtgggatgtggctgagagctggatggcacagggcaaagaatgggcttggagatgggggagaggttattgtgggcagagcaggaggcagaagagatttggatggtaggaagggctttattccaggttggagcatgacaagaagtggacagaggaggagggtacacccatcccgtctggaaaccagggagttttgggtggaggagggagatcagtttgcagaggttgggtggagccaggtaatggagagcctccgggccggggcgggcgggagcgtctgatgtggcttggatgcaccaggcaagtaagaaagtggtaggactggccgtgctggagggagggcagttccccatggcgtgcaaagcctgcagcagaggcagagaggagatggcaaggagcgagtggggagaggccctgaaggccccctggcccaggtgtgtgcaggttttgccaactccacggtgggtttagcctgggtggtcactggaaactggggcctgttgtgactgggtcagggtcggggacctgggaggcatagtggctcaggatgagagcatgtgggcaggctttgacacagagcccctaccaccccaatgccatttctcgcctcttcagagcccccaggtggtgaggaccccccactggacacagatgttcttgtccctggagctcctgagcgccactcgcccattcagaacctggaccctccactgcggccagattcaggcagcgcccctcctccagccccccgttctttttcgggggctcgaatcaaagtgcccaactactcgccatcccggaggcccttggggggtgtctcctttggccccctgccctcccctggtgagcaccgggcatgtgggggttgggggtggagccgcggaggtgggagctgctggtaacaccaaccctccccccacaggaagtccatcttcactgacccaccacatccccacagtgggagacccggacttcccagctccccccagacgttcccgtcgtcccagccctttggctcccaggccgcctccatcacggtgggcctcccctcctctaaaaacctcccctcagctcagggtgccccctcctacctcagtcgtcacagccctcacacctacctcaggggagctggctccccctggcccggccccatctccaccaccccctgaagacctgggcccagacttcgaggacatggaggtggtgtcaggactgagtgctgctgacctggacttcgcggccagcctgctggggactgagcccttccaggaagagattgtagccgctggggccatggggagcagccacgggggcccgggggacagctccgaggaggagtccagccccacctcccgctacatccacttccctgtgactgtggtgtccgcccctggtctggcccccagcgctacccctggagccccccgcattgaacagctggacggcgtggacgacggcactgacagtgaggctgaggcggtgcagcagcctcggggccagggcacgcctccttcggggccaggagtagtccgggcaggggtccttggggctgcaggggacagggcccggcctcctgaggacctgccatcggaaattgtggattttgtgttgaagaacctagggggtcctggggatggaggtgctggccctagagaggagtcactccccccggcgcctcccctggctaatggcagccagccctcccaaggcctgaccgccagcccagctgaccccacccgcacatttgcctggctcccaggggccccaggggtccgggtgttaagccttggccctgcccctgagccccccaaacccgccacatccaaaatcatacttgtcaacaagctggggcaagtatttgtgaagatggctggggagggtgaacctgtcccacccccagtgaagcagccacctttgccccccaccatttcccccacggctcccacctcctggactctgcccccaggccccctcctcggcgtgctgcccgtggtcggagtggtccgccctgccccgcccccgccaccccctcccctgacgctggtgctgagcagtgggccagccagcccgccccgccaggccatccgcgtcaagagggtgtccactttctccggccggtccccgccagcacctcccccatacaaagccccccggctggatgaagatggagaggcctcagaggatacccctcaggttccagggcttggcagtggcgggtgagtgcgggtgctgaggctggcagagcaggcaagggggcagatgggcgggagatgcggctcatccttctcgggctcgccctcccaggtttagccgtgtgaggatgaaaacccccacagtgcgtggggtccttgacctggatcggcctggggagcccgctggggaagaaagtcctgggtgagtggccaggcccctctccctggagggtctgggacctctgtccttccccttcctgacaggtctcttctcgcaggcccctccaggaacggtcccctttgctgccacttccggaagatggtcctccccaggtccccgatggtcccccagacctgctgcttgagtcccagtggcaccactattcaggtagggaccggccttgccctctccctccttgcctgtgcctggctcagctgggtgactcacagatgcaaaatcagccctctttcaaaaccagtatctactcccaggggccaagcctgaggctcggtgctagagttagagatgaccttggggagcctctggccttgtgggagaaacagacatggaaatgacatttcgcctctacgtgggatccttttaagggtctttgtccagcatgcccaagagcctaggggagggcctcagagcctagcctgccaggagctgagagagagcttcctagagtagccaaaggtgaagttctaggatcatctagagggaatgcagcccagctagcaccgagatgagggtcagggacagtgggaagatcagaagagtggtgtcccagaggcccagggaagggagtcgtcacatctcagctgccacagagactgccaggcctgtggagtctagcgttggtgtccagtgagagcaggtggcacagggtggggcgttgtgtccaagtccagaattgagaccatggttgaagaaggcaaaacagcccaagcacttggccagagttcagctaaggatcgggagcgggaggtgggcgagcagcgtggaggtgcttggtgtgagggccaagacagcggagccatggatggcagggaagggcaggctgggatggaaaaggcagtgggaagaggcctggtggctggttttgaactggtgacctctgaggtaaaggagaggagggaaagcaggtgtttatgcagaaactgtaatacatggggtggaggcccctggaggaggcttggctgatggactccttgaagctggcggtggagtggtggagttttctgttggtccctgagggcagtggctgggggagtggctgcggccaggtaagctggtggtcgagcagcctgaggctgggattttgtggtggcccaatcctgtccagatgtttggattttctcatgacacacagctcagttgctgagctgggaagcagagtgacgtggattgagagtgcttaactcagaggctgcttatgtctcagagatgacatgagaatatggcagtggccttaggaggtccctgtcctcagggatcagaccacattttggtgcgggacacagacatgttagcaagggcaggttagagtgggcactgagaaaccgagcagtgagagcacctgccagggtcctgtggtcagtcctgctgtgtttgggaaactggaagtgagggttgggggacacagggaagaagttgacagaggtggactctggggcactgaggcctggagaagacgggagtcacacggcaggagtgttgctttagagtctcccttggggcaggggaggtggggcagggtggcctggagaggtgacatcgggagagtgtggccatgtgggttttgcctctcctaaagcctgttccactcaagcttttgtgcccccaacccccagtggtcagtccccagcccacacctgcttgagcagcagcagcgtttggtgcagcggatccctcccgccttgaagcattgtcttcccggcttccaaggctgctcctgctctcacctctggtcctgcctccttgctcacagctgtcaggctagatgtgtcccgggaccctggccttgacttctgtgtatgctcactcccaggggctcccttccagcttggtggctgtcctcccgtctgtgttctgattgtctccacattgctctctccagcctagaccctgtccctgaactgtggcctcctccatcctgtcctgctgcctgcccaccatctccaccagcaggttgcagggggaggtttctaagaggcctctcaaagtcagcctgtcccaaactgagccctccacctgcacgccaaacccattcttcttttgccttcgctgtctcagtccacagcagttttatccttccaggtgttcaagcccagcgttgtcccgacccccatcccccttcttcacatccacatctactacgtcagcatatcccgtctgccctgtttaatctattaaccctcgagaaatcccctaaatagctcataacatacagtgtact[136 bp omitted]atctgtactgaaaatacaaaaattagccgggcgtggtggtgggcgcctgtaatctcagctactcgggagactgaggcaggagaattgcctgaatctgagaggcacaggttgcagtgagccgagatcacaccattgcattccagcctgggagacagaacgagactttgtctcaaaaaatgataattttatgtttgtaacagttacagaaatttgctgcatctaaaaaaaatagatgtgcaaaatacaattctccagtattttaaattttgtgtgagaaacagaataatgacaggtagatgggatgtatggtacactgggtttgagtgagccataggcgtgtcctgaagagccaaaaggccccaagcctctgtggaatgcttttgtacccaagaagtcctgcagaagaggagccgcaggctccttaggggaagaaatgtccattctgcagggctcactgggtaactggagcagaaggagggccattagaccctagtatctgtgtctgcgcctaggggtggagagagtggtgtctgctgggagcacagcggggctcaggggcttttgagtccgggaagggtgatcttcactccaacctgcttcttgggaccaggtgaggcttcgagctctgaggaagagcctccatccccagatgataaagagaaccaggccccaaaacggactggcccacatctgcgcttcgagatcagcagtgaggatgggttcagcgttgaggcagagagcttggagggtgagtggggggagtgcagtggcaggagggagagtgtccataaaacaccatcctgactcagctctggctctgctgtctccccaggggcgtggagaactctgatcgagaaagtgcaagaggcccgagggcatgcccgactcagacatctctcctttagtggtaaggagtgggccccacagggggcagggagctggatgtctccccgagggcaccatgggccctccacatgacaggtgtgtcctcaacatctcccctcaggaatgagtggggcgagactcctgggcatccaccatgatgctgtcatcttcctggccgagcagctccccggagcccagcgttgccagcactataagttccgttaccaccagcagggagagggccaggaggagccgcccctgaatccccatggggctgctcgggcagaggtctatctccggtgagaggtctggggtgtgatgcctgggtcagggcgcccctatgagagctcttgagggtgggagttaactgtagaggttggaaactgaggcctggggaggagacactaggtcacttgaagagttatttctagagttagccaggctccgtggctcatgcctgtaatcccgccactttgggaggccgaggcaggaggatcgcatgagcccaggagttggagaccagcgtaggcaacatggcaaaaccccatctctaaaataaaaatttaaaaaagttatttctagagctgacatcagaaaaatgaaccccacccatttccctgttagctctgtcttcaacagtatattcctccttcccctgctgccacctgcaggaagtgcacctttgacatgttcaacttcctggcctcccagcaccgggtgctccctgagggggccacctgtgatgaggaagaggatgaggtgcagctcaggtcaaccaggtatggagtgtgagctggggggcgggtggtggtctggaagggtcttagagagtgagcaggggtgagagaggtcattctgagcaccagcctgggtgacactgctgtccctcaccagacgtgccaccagcctggagctgcccatggccatgcgttttcgtcaccttaagaagacgtccaaagaagctgtgggtgtctacaggtgagtggggttgggggggaggatgccccttgggtggacggacaggtgcactgggtagggggtactgtctggtttctgtccccctcccccctgagttccctgttcatcctgccctgcagatcagccatccacgggcgaggcctgttctgtaagcgcaacatcgacgcgggggagatggtcatcgagtactctggcattgtcatccgctcggtgttgactgacaagcgggagaagttctacgatgggaaggtgggctcccagtggctgtgggaagacagtgggtgaagcgagcctgtccgcggggacagagcacctgatctccccacctcatccctgcagggcatcgggtgctatatgttccgcatggatgactttgatgtagtggacgccacgatgcatggcaatgccgcccgcttcatcaaccactcctgtgagcccaactgcttctctcgggtcatccacgtggagggccagaaacacattgttatcttcgccctgcgccgcatcctgcgtggtgaggagctcacctacgactacaagttccccatcgaggatgccagcaacaagctgccctgcaactgtggcgccaagcgctgccgtcggttccttaactgaggccgtggctgcccaccacgacccctcacacctcctgctgccgtcgctgccatcttgcccctagcctgggggctccctagcccctcccagagcatctcacccccaccctcatgttcagggtggatgtgggcatgcaggtgacaagggccctgcctccacccctccagcccatccagcaatcgccccctttctgccctgggggcccaggatgtagatattgtacaaaggtttctaaatcccttcttttctatgcacttttttatttaagaggtggggtcccaggtgggaacccccccacaataaagtctgtcaatgtttggagaggtggtcttcccatttgtaggctgtgggggcaggtaggaaccccacttctacacacccacccatcatgacccaaggaagttcatcagcctcaacaggtaggtgaggccatcattcagaattagaagtcagtcatggggtctgttacggcttcagaacaacacaacacagcaactgtctgtagcagggttgtttcccagaggggattctggtggcccagaggcacctggggtcagccctcccacatgtggccctgtgtgtatgttggaataggcccttctagggcgaagagcagtgaggctatctgttgggtctttgcccaattaggattgtacttcaagaagtacttcagtgctaattgtatactgggcttagtagtcagcaaagttctttattgggtgttaagcccagcaaaccccagatgagccaagcttggacagcacccgcaatgcatctgcccgccctagctgggcgaggtgtgtgccaagctggcccagggaggcagagggctcccttgccaccaccatctcaatcagagcccgcagcggcgagcgactcggcctcagcgaataggcaaaggtggaccaggcagcaggcagcccatatcttgcggccaggtgtcgagtagtgccatgggccatacccccacctggcccaggctcagggtccagcagtacaatcagctcttccagcacctccagctcatccaggaggcgagacaggggttgtgacgccagactggacagttctggaagaaaggggaagggtaaaggtgcggaagagcgggcgtccagtccaccttccctgccccggggctcctccaggactaacccctgctcaggagtggaagtagtgaggcctccttccatgtgtcccctgtctccagggcgcctggggaggacagatgcgaggaggaaggggtgtgggtgttggggactccgcagaccaagccaggatagggataggggtcggctttctccttgggccagcagagatgccagagcagaataaacaggaggatcgctatcaccgccaaggtcaggagcaggaccagcaccacgagcggaaggaaattcggccaggcctgctgagggacaggctcaggggtcctccaggcaatggaacttgctggtgagctgcgctcctgggagctaggggcgcctgggtttccaggtgtgagggggcagtgccccttggcagggaccggcctctggggataaggggttggagtaaagctggaggccacactccactcctgcccgctcccaaacctcccaactttatatcctttaatggggccacatcccatctgatacggtatctgataaggtagttgggccccgcaaggcccaactaccttaacctaggacctcccgacccctgcaggccagccacctcctgaaaccacggccccaccccttacgtggggctacgccggctccctacatctaggccccccacctccagcacgcccttgccctgccgggagtcccatctgcacctctctgcagcgccacggggttctgcccccgcccgcggcgggagtaggggtcacggctccgccgccgcaggggctacatagctccgcgccgtcggggttgcactgcccagaagaacactttcggaacgggggcgttacgaaatcgccgtggtcattgagtccgcagttttcccggaactcatagtctagcgggaaagctgcgctccagtgcggccgcctagcccgcccctgcgcgggcaacgccctctcccttcgccctatcccagcgtgccccgcccctccaggacgcttccagcctattagcgtgcgccccggtcttgtcacttttctccgggctcgccttttcacccccctccagcctgctccgcacgaagctccgcccactcccggcttctctacataaagcccaccctttccacgcggcccctatcccgcctctccagccatatccattcgctgttgccctacggtagcccgcactatctgcacaggctctgcctgccatccctgtctgatctgcataaggcccaccgcttagacccctaagcaagcctctctggcccgtagcccacagacctcgccccttccccgctccctatcacctgcaagctccgcccaagcaaggctcggtctcggattctcacccgggcaggggggcggcccgaagcgttgcaggcagctgctgcagcacttgttgtctgggttccagtattcaaggcggccgcagtactgggaggcttccggcggtggcgccagggccagaagcaacaaggccgtcaggaggcatcgtccaggccccatctggggggccgtgatagcgggacttccaaacacagcgcctctgctacactttccggggaaatcgggcagaagaaaggacgcggtgatgtgggggaacagaattctcacgcctcttcggaagccgggaatctacccccgagccctcatcccccaactgagccggttatcagagaagcccacaaggccactaggggactaacagggctgcggatctagattgcaagaatgcatatcccacctctgccgtgtcctcacccacccaccctcccttttccatccctaaaataagacaatgatagcacctgtctcatagggttattgtggagaattagaaccgtcattagaagtaaagcaggggctgggtgtggtggctcatgcctgtaatcccaacactttgggaggccaagacaggaggatcacttgagcccaggagttcgagagatcagcctggacaacaaaatgaaaccccatctttacaaaaaaaaaaaaaaaaaaaaaaaacagcaaagcactttgccaagtgcagtggctcacgtctgtagtccctgctactagggaggccaaggtaggaggattgcttgagccatgaattacagaccagcctgggcaacacagcaagacctcatctctaaaaacaaaaaaaactggccgccgggcgcagtggctcatgcctgtaatcccaacactttgggaggcccaggtgggtggatcacctgaggtcagtagttcaaaaccagcctggcctacatggtgaaaccctgtctctattaaaaatacaaaattagccgggcgtggtagcgcatgcctgtaaatcccagctacttgggaggctgaggcagaattgcttgaacctgggaagtggaggctgcagtgagctgagatcgtgccattgcactccagcctgggcaacaggaatgaaactccttaaaaaaaacaaaaacaaactaaagtgctgaaaacagcacctcacatacagtaaactcagtgtttaagtgtaaggcattactaactcccatcacaattcggcaggcacggaggagtcagccccatactggctggagaccacctcccagcacctcacctcacctttgaatcctaatctccttggggctagggctcctcccacctgccacaaccaggtctctcccccttgaataagcctcagatggaggtgctaaggttttcagcacaaaggtgtccccaccctaccagtaccgttagggtcctgggtcccaagctggccgtgccaagttcctcagctgaagttgtggccaggacccagtcttgtttccccttttcgtcacatgtgtgggtggagggaaatgccaaaccacagcaaaagcaagttgatgccgaagtgaaacacgcagctttattaagacaggggcggtagaagaaggtctccatgctgaacagattacattatggagcccgggagcctgggaaggatggggcaggagagtgaagggggctttgaggagaggtcctgccaggaacatctgtccctgttgggggtgaagggtaagggggccagggcctcagaagcggccatgccagtgatcaggggaacaccgatggttcctctctcggggatggtggccagtatggaacctcgggggtgacctgggaataggagcgttgagagttctgttagaaccctgaggagtggtgcagagatcctgcaggcctgcctctctgctctgggatgaggcaggagggtgctgaaataactagagttctaagacacgacctcagtggccagtatcaggggaactcagtggccagtatcaggggtggcaatccaggctggtcgtggattaggggttcaggctggtttggggattgggacttaggtactggtctccagatggagctcagaactactcttagggtataagagtcttgggaatgaccgggcgcagtggttcacgcctgtaatccccacactttgggaggccgagatgggtggattacctgaggtccggagttcgagaccaggctggccaacgtggtgaaaccccatctctactaaaaatacaaaaattagccaggcatggtggcaggtgcctataatcccagctacttgggaggctgagaaaggagaattgcttgaacctgggaggcagaggttgcactgagccaagactgcgcctttgcactccagcctgcggaagaagagcaaaactcc[136 bp omitted]tggtgaaaccccatctctactaaaaacacaaaaattagccgggcatggtggcaggtgcctgtaatcccagctatttgggaggctgaggcagagaattgcttgaacccgggaggcggaagttgccatgaaccaagatggtgccaatgcactccagcctgggcaacagagtgaggctccatctcaaaaaaaaaaaaaaaaaaaaaagattcttgggaacgtggttactggggcttagggttaggctcatctgaggatataggggccttaggacatgaggagacatagcaggctggtcctgaggtacctgcgcctgggtccccgcccatagagctgcctctggaggttctgggaaatgggccgcagatgcatgaagttgcagaagccacctcgggtacattccctgcatagagggtagagagatggaggaagccattgtcactgacagcccctaccacgcattcaaagtctgggattccaagtgcccatcccacccttgaactaccataccccatctcatactggcgacagcatgactcccggaagtcagtgacaggagacagctcaccgtgcacagcctgcccgttgaaccagcggttactgagttcagccacggcccgctctccatcctcctccctccggaactgcaggaaatgtcagtcagggtcagcaggagaactcagagatcttcaggggactcactacccgctctggggctggactggatttagtgatgaaattcaagctgagagcctacagtggccaccatcaggcattgaaacgcctccacttctgggccctaagtggggggcagcaagcaccttgacatagacgttgcccacgaggtggtccccaaggttgtcgcacacattcatctcttcaatctccccatacttctcctgcagttctgtgaacacctcctgtggaagacggggaggaactcagctgagctcccacaagaaaccccatctgcccctaccaaccctcacctcgaagaagctatcatagtgctcctgcacctccacgtcactcacatgacctggggtgggggcgggcagggtggaatcagagtgtagcctactgggggctgttcaccttgcccccaggcctggtcccttactcacagtgtgatccgtctgcagtttgggctgtgttctgtggattccggtacaggttgagcagcactatggtctgcacagaatttaaaaggggcggggcctgagctcagagggcagggctgcatgaacagagagtgaggcatgaaggttgggggtggaaccttacaccccagcctaagcatcatgagtgcatcggcgatcctttgcccctaagaaaccagaaaagggatggaggggactggcaaggatgaacagcgggatggaagggactggcaaagatgaacagccgccgtgtgtagcctgtacgcatgggggcgcgaccaagttcccgggaaaacggcacgaagaccggtgggaggagcctgcagaaaggtccaatgagaaaaaaagccgggcggtggggagggactcaggaacccggaataggcgggacatggtgacgacggccccagaaggggaagggccagggagccgttaacccccgaggctccgtgccgggtctcacctggctgaatgtcggcttgttgtgaagccgggagcaccggtccccgtgccggcagaccccgatcttaaagtaaaaagagcagttaaccctggaaaaggtgcaaagacaaaggtgaaccgagggccggggaagctgggcaccccagaaacaccgccccaccacccaggaccccagtaccccggccccgaccccccgagagtccactcccagcgcccgttctcacttgtccttctcagtcccgaatatcgaagctaaatattcagccatttttacccaagccctccaggtctggctgctcttacgtcacttccgttgcttaggagcactgggaagtgtagttcgttgccctctccaggcgcttaccaagcgctcggaaacgccccagggcgcttgcgcgtgggaggcgcgcgccctccccatagactccccggtaggagttcttttaacagcgcatgcgtgcagtgttgcctcgcccaaagaagactacaatctccagggaaacctggggcgtctcgcgcaaacgtccataactgaaagtagctaaggcaccccagccggaggaagtgagctctcctggtgagttgggggtcgtttcgcccaccctagtaaatataaagagctctttaatccagccagcttactagtgggggtggggatgccctgctttcagcaaaccgacctttacatttatctctgatttgttctaataggggcgtggttgttcgtgatccttgcatctgttacttagggtcaaggcttgggtcttgccccgcagacccttgggacgacccggccccagcgcagctatgaacctggagcgagtgtccaatgaggagaaattgaacctgtgccggaagtactacctgggtaaggcagatcgctagggtcccaggagaagagaggggactggactagagcacccgagggaagagggcctcggggcctggattcttaagtctaagagatgaaggacctgcgaacgccgactcctggatttgagtggggagggcctgggtcctgaggaatgaggaagctggggcctcaatttctggatcccaagagaggagggggattgagggcctggactcttgggtcctgtgaaagagatggttgaggaatcagattcctggatcccaaagaggagccagattcctgagtccctgacaacagaaatctccatttgaacttgggtgtgggagagtttcttccaaatagatctcggtgggagttggagaagatcttcattgccttatgaggttttggggtttgtttgtttgtttttctttctccctaggggggtttgctttcctgccttttctctggttggtcaacatcttctggttcttccgagaggccttccttgtcccagcctacacagaacagagccaaatcaaaggctgtgagtctagagcacagaggagggaggccagtggcaggggagagggggaagcggggaatcttggtgggaagggacaatggaggatccaaaatgttggggctctgggtgagaagggaaggctggtctagggaagtctggagagcagccggaggccaacccttccagcttctgtttcccatgacagatgtctggcgctcagctgtgggcttcctcttctgggtgatagtgctcacctcctggatcaccatcttccagatctaccggccccgctggggtgcccttggggactacctctccttcaccatacccctgggcaccccctgacaacttctgcacatactggggccctgcttattctcccaggacaggctccttaaagcagaggagcctgtcctgggagccccttctcaaactcctaagacttgttttcatgtcccacgttctctgctgacatcccccaataaaggaccctaactttcgatactgacttcctgggatcttttagaggttgaggcataaatgattattaatatttaaaaacatctgttgagagctttgtacgaggcttagtatttagacatgatgtacattttttacagtgcatactactcataatcttctgaactaggaactttcctgctcaggaaactattagatgagaaactaagaaaggaatagtgcttccatttctttttcttttttcttttttttttttttttttgagacagagtcttgctctgtcagccaggctggagtgcagtggtaggatcggcctagtgcttccatttctaggggctgttatcctgtactggtagtcgtgaattcaaaaatataactttcctactgtgggctgcagtattctcatcagaagtgtagatcacgatgctacttcctgggatttatctggaccaagacgtgtgacaaatggaagtttcccgttttctgaaggaagtgttgtctgcaaaaataaaaatagtcaagagctttctcagagaatccttccttgaccatccatcttatttaaaattcaatcaccaccttgatattcctatgtccctttcaggctacactttttttgtgggttttttttttggggggggagaggggtttgttgttgttgtctgtttgtttttctagatggagtcttgctctgtcacccaggctggagtgcagaggtccgatctcggctcactgcaacctccgcctcccgggttcaagcgattctcctgcctcaaactctcgaatagctgggattacaggcgcatgccaccatgcccggctaatttttgtatttttagtaaagactgggtttcaccatgttggccaggctggtctcgaactcctggtcacaggtgatctgcctgcctaggcctcccaaagagctgggatttacaggcgtgagccaccatgccccgcccagatcatattctttctcctattacatttcacttaaaatttacttgtttactgtttatcttccctcctttaaaagataagctccattagcgcagggatttttgtctattctgttcctcaaggtgtctccaatgcctagaagagtgcccgacacactaataaatatttgcaaaatgaatgaagttgtacctgcaaagagattaacagatacctggcacctagcgagtgctcagtgagagggaacccaacgttattttacattagtcttcctcttagggatgaagggaccccaacggttggttaaatccggtaaagagctaacttggtgttgctcaacccttctcacactacaagtcccgggaagcctcgcgatgccctaatcctttgtttcccaccgtgccccgcgcggcgcaggcgctgttactcagggtgagtctgggaagctggaactacacctcccaggaagctagggggtagatggtttgtttccggaagcaaagccccaggtgggtgggacctaaagctgggagactacggaggcagctctcaattggtcaggatgcgagattgacggctgcaataactaataggaacaagctactgccgaaggggcccgcccacagaagggtggtggccacggtccaggctggacacaaccaaaggcggaggacccgtggcccacgaagctcatctttgaactgtccccgccttctcccgccttgacttgtgaccctaggccctttggggcgcctctgacccagctagccagatcccggacccaaaccatgttccctgtgaaggtgaaagtggagaaatcaggtgaggaccctgacgtcgggggcctgtcgggaccatcgggttgacagggtgtggagtcccggtggaagggagtatcgcggaaaggggactgcacgacttttccctgaagcccacctgacaatcgctgtatcaggcagcgagcgttgcctgccaccttcacaccctcccggtgtgcgcttgaagtcgctttgagattgaatggggtggctcgggcaatgacgtgcgtggtaggacatggggaatcctgagccggtaactctgagaagggcccttttctttcctcttttttttaatttaaatttttaaaatatttaaatagagacggagtatcgctatattgcccaggctggtctcgaactcctggtctcaagcgatcctcccgccttagcctcccaaagtgctgagattacaggcgtgagtccccgcgcccagccgagaagttctcttttcttggcttcccctcagtttccccatttccagcagtgatcagagtcacacatcttgctgtgagcctgaagtacaggcactcttaatcctcacagtcactatattccagtaatcctagaaaataggaactgtggtcaatgggtgaagcttagaaagaggagagaattttgggttggggcggagctgaccggatcccaggcctggcatggtaagggcagtgggaggggtgcagaatttagacagaaagataatagtaaaatgatgtaggatgtcccatggcaaaagtgttattaaaacaaagtgggaggctgggtgcggtggctcacacctgtaatcccaacactttgggaggccgaggctggcagatcacttgaggtcaggagtttgagaccagcctgggcaacatagcgaaacgctgtctctataaaaaatacaaaaaaaaaaaaaaaattagccaggtgtggtggcacaagcctgtagtcccagctactcaggaggctgaggcaggaggatcgctggagccggggaggcggaggttgcagtgagctgagatcacaccactgcactccagcctgggtgatagattgagaccctgtctcaaaaaaaaaaaaaaagaaaggaaaagaaaagaaagaaagaaaagagaagtgggtgtgaccacaaatgatggtgagggaaggtgtacacctgtgagtgccaggctgaggagtgcagactccacccctgggtgctgtggagtcatggaagtttccaagcaagggaagatcagggtcaggtttgttatttttcaggaagattcccctggctgccttgtggagggtgtatcagaagggggacactgaggcagggagccaagggggagcaaaggacaggaccaggatgggtagagtagggaggaggtgggtgggagagacactcgggaggcctagtggacaggccatggggttggtgggctgggtaggggagggagaggggtatccatggtgaggtacagggagggacttggggacagtgaggcgacccttgagagggaggcttcaggcccaagtcgggggttcaggagagaggctgggcctgaggagagttgtggacgtgatccgtaccctctgcatctgcccaaggctttgctgcaatctcagctactcccttccccaccctcactctgtctctcctctgagctatgtttgaatccctgtgtctcctgggcttctcaggaagtccctggactggtcaggcaagttcccaggtgtcccctccaggctctgagcactagagccagagctcccaccagtcagaaaggcagagcaaacacctctcaaaggtaggaggacagcgtaacatcatcacttcctcaagttctgtgatgacgggaggcagccacaggctaactgggcaggaaggtgggcctagatctcatttcccgagggggaaaaaaaagcccaaacaggatgttttaggtgaaatctcccaattttggctgggtgcggtggcttctgcctgtaatccagcactttgggaggctgaggcaggtggatcatgaggtcaggagtttgagatcagcctggtcaatatggtgaaaccctgtctgtactaaaaatagaaaaaattagttgaccatggtggcacgcgcctgtagtcccagttctttgggaggctgaggcaggagaatcacttgtactcaggaggcagaggttgcagtgagccgagatcacgccactgcactccagcctgggagacagagcaagactccgtctcaaaaaaaagaaaagaaagaaatctcccaatttttaaatgtcagctcattcagattgaattcagatttaaaattataccactgttggccgggcatggtggctcacgcctgtaagcactttgggagcctgaggccagcagatcactgaggtcaggagtttgagaccagcctggtcaacgtggtaagaccccatctctactaaaaatacaaaaattagccaggcgtggtggcgggcgcctgtaatcccagctatttgggaggctgaggcaggagaatcacttgaacctgggaggtggaggttgcagtgagccaagattatgccactgcattccagcctgggtgacagagcaagactccgtctcacaaaacagaaatacattaattaattaaaataaaattataccactgcctcaaccagattctgcactcaggttgagcctctgtctcataacttcagctttggaaccagacagcctgggttcaaatcatcagctctgcaatttctttgctgtgtgcctttgagcacgtggcctaacatctctgtgcctcagtttcatcatctttaaaataggaataaaaatcatatctatctgagctgggctctatggcatgtgcctatagccccagctacttgggaggctgagacagcaggaccgcttgagcccaggagttcaaaaccggacaacatcgtgatatcctttttcaagaaaaaaaaaaatcacatctacctctaagggttattgtgataattcagtgggttattatttgtaatatatagcatatttaaaccttgccactgggacaggcacagtggctcacacctgtaatcccagcactttgggaagccgagatggctcacctgaatctaggagttcaagaccagcttggtcaatatcattaagactccatctctatacaatttttttgtaataaatttatattatattaaaacacatttttttaaaacccaaaaggctcataaggtaaggtgattggccttacctcctgtcacagagcaatcacgtgggacagctctggaactcagagctctgggcatcactccagccatctctgcctgttgcaccctttcaggctgcctgggcctggctctgagattggccagggcagaggacacgcacgcccttccctggcccagtcagctgcccacctagctggggcctgggagctgactcctgctgggtcctctcttgccccagagctggagatggccaaagcccggaaccaactggatgctgtcttgcagtgtctgctggagaagagtcacatggacaggtaggccagcgtggggtcacagggccgggcaccctggtgggttgggccctctgatcctgggtggattgggtgggaccccacaggctgacttggggaggaaggtgcttaatggggaggctgctcggtgccttccttctctggggccctggaaccctgagctgagagatctcttctgcctctagggagcgtctggatgaggaagctgggaaaacaccctcagacacccacaataagtgagtttttctgattggatttggagttgagagttcgtggttggtaacttctttccttatccaagccctgaccgctcagcccagcgctacctccatcgtggcccggaccactccacctgtacaaagaccctgtggcaggagaagcttaggtccccccgtggttgccacctagacccccatgggtatgggtgggacaaaaggcccaagaggcaagtggggttcatgtgagcatctcaggtttgataccagtatccccagggtgccctctgcagggttttgcacaggcgtttgtctgagggtcaactgtctttccccacagggactgctccatcgcagccactggcaaaaggtaaggtggcagggtcccagccagctgactagaggctcccagctcctaccccagtcctgacactccctctccctacgcaggccatctgcccgcttcccccaccagcggaggaagaagaggagggagatggatgatgggctggctgagggagggccgcagcgatccagtgagtagacagtggccctagagggtcggtaaggagccaagggcctatgcaaggatgctcacacacctcccatccccaccttcccagacacatatgtgatcaagctgttcgaccggagcgtggacttggcccagttcagcgagaacacgccactgtacccaatctgccgcgcctggatgcgcaacagcccctctgtgcgcgagcgtgaatgctctcccagctcacccctgcccccgctgcctgaggatgaggaggtgggatgggtagtgggtcccagcccagcagcctggtgccagggcagtgggtggataggctcaaaggatcctgcccctaagctagtgggatagacagacacaggtccctcacgtgaatcctggatcaggctaggcacacagatgtgcactcttaggttggggtgtggatcagagtccctagggaagacatacgtaaccacctggcctgggagacagggaacagggttaccctggacagttagatgtggacctccaagatcaggggttcccaagagccgaggggctagacaagggtccttagtacagacagaagtggccaccaggccttgaggagcaggggctgggcaggaatggatgggagtctataagccatctgacccagcggggtagacaagggtccccaggacagacatataggacccttcagacatataggactgtcagaaatggacagagcttcctaggtggcacagacgtgaccccctagacaggattccctgaggcaggcagacgcgactccctgggctgacaggtgtagatggagtctctgggctggataggagaagacaggggtccctggggcaggcacacttgacccgctggctggttgaggtgtctgcccttcatacatgcctcctgtctgagtcccttagcgagcccctcatgccatttgttgctgggaaaggcaggagggatgaatgtggattcccagcccctctgctttgactctcttgggcctggcatggggcccttgtgtccccagggctcagaggtaaccaacagcaagagtcgtgatgtgtacaagctgccgccacccacacccccggggccacccggagatgcctgcagatcccgcatcccatctccactgcagcctgagatgcagggcacccctgacgatgaggtgagtatgccaggctggcccagggttatggggcacatgcggtagggctcaggaatggccactcaacctggcctgtctgtccatgcagccctctgagcccgagccctcaccctccacactcatctatcgcaacatgcagcgctggaaacgcatccgccagaggtgagcgtcccccagcctgcttgcccctcgtagggccctttgcaactgctgagtctcccctctgcctccccaggtggaaggaggcctctcatcggaaccagcttcgttactcagaaagcatgaagatcctacgagagatgtacgaacgacagtgatgttcccaggtccccccacaccagtaaacatcccccagctccacactggtgtctgctccggtccctccttcctggcccaggcacaaagcagttggcagagctctagcacatttattgggagagtaagcctgggaaagactaagggagtggtggcagggagaaaggctgtggggaatcagagcgggtgctcagttgggtcttgaaggagaagaggaggagggtgggaggtgggttgccgaggatatctggttgaagacttgggggtcaagacaaagggacttagggggatggggtctggttagagttggggagggggcctaggacatccgtgcagagtctggggaggttggggtgggagagtctgtacagtttggtgttgggtgttctagttggcctggtgtccaagagttggggcagtcgaaaaagggttccagagtctggtgtggctggctggggtttcacggcagaaaatgggctggagggggcagttgtagactgtctggttgcaggggaaggatcgggtcttgggaaccaggcctggatggtctggagtgggaggtctgtgcagtccaggacgtttggggggtggggggattgtgcctgactggcctggggttgggggagggctgtctacaccataatttggtgtcaaaatagggaagggatggaaatgtagtacccggatgtctttgtagaggactcagaaggaagtagaggaggggtcttaagtggggctatatgccaagaaagtgggtcggtggggctgagactgtcggctgagggttagggtagtgctggtagggtctggaagccggggagttgtcggtgtggggtcggaaagctggagggggtgtgagagcgagggtgtcagtggaagggtctatgttatcaaggcagtgtccaggatggaggtcagggcagaatccaggagtgggtgagaggacagtccttggcgcactcgggacatctggctgggcggagtcagatcggctttaatagagggagcctgaggaggctcccggggtgcgggcgcggcccagccccctcctacttggctgcggctggcggtggggcctgggccgacgctggtgcggcctggatggacaggacgccctcgggggacagcgcggacgtcacggcagccggatccacgccaggcggcaggcggtagcgacggtggaactcgcgcgcgacgaatccgtgctcatcctggaggggagggaggcttgagcggccccgcccctccggcccggcggcgagcgtacccgctccagccccgccccacgccgcggctcaccgggcgctcctcgtggcgcgcgtgcacctccacgtgttcgcccaccaccttgacagcaatttcctccggcgagaagtgcttcacgtctagcagcaccgaaaagtggccggggtccgtcggcacctgagcgcagcgggcgcgggcgggactgtcattgggctgggccaggctccaggacccacccagggagaccccacccccgtcggttccgtgccgcggctcactctggcctccggagttgagcagtcagctctcctactgggagtcacccaggacctcttcaccctgaacaacagggatacgccctccccctgtaatatctgggattgccctctcccccgcagtgatgaggctcccttcccctgcaaggtcaggaacctctgccctcccccggtgtcagcgaatccgaagtcatcgtgccccccagggcactgattccccagctccctcctcagagccccgggtcccttctccgccagccccgccaaactcgccaagatgcccctttccccgtctccagggtcctctgcctactctcccactcgagtcacgggacctcggcagctactggtagccttcccccacttcagagtggccgggaacccttcctcaagtcgcagggccctctcccctcctcttctggagatatcgggccaccgcacacagtctctcaactcttccccgagactaagaacattccttcccctcaggagtcactgcccgcctccttttccccagatttcccggatcaccagcctccttcagagtaagcaagactccccttagagtgacccaggccttccattctctggagagctgagagccccccaccccgccccccacctaagagcgacggggacctcccacccgctgcagtgtgcgggcctcagattcccattgactccggaagcccttcggagctgcggactctccaccccgcccaaggccaacgaacattctctcacatgttcccaccccaggctgccccagacccctggcaatggaagtggtcgagttcacccctccccaggcctggcacctgggcgacgggcagcgccacgctgggtgcgcgcaggtagtagggggcgagcgtggtggggcagagcgcagccagctcggcctccagcagcccctcgccgaagcgctggtcaaagaggcgtccgggcgccgaaagtccgggcaacggggccgaggcgcggcgcagccaagacggctgcacaggcacagggatctccatcctgctcctccgcgttgcagtgcccctgcgtgcgcagccgctcatttatagtgcgccctgtgccggcccctcggagggctgcccagggacactgggaccgtggccagacccggccattaggagagccttatttagaaacccaaacaatgacttggccatttattaagcgcctgctggatgcctggcaaatgctgtcaagaaggtgacatgaagattccccaatttccagaagaggaaactaaggctgaggagggggagccttgcgggtgtggggagcacagcgtggtgattggggcccaggacccaagaggcccacggaagagtttccagtccctttaatccactgcctcccccctggcagctctgaggatgacgcagatggaggtctttaggagcagattcctggagaatgcggtagccccgccaggatgtcaggaggacatagaacaggccctccctacccttatcctcagccagaccttgggcccagtcccccggcaggccgggcctaattctgtgcctctgactcagcctctggtgcgcagaggccagggggcgcgagcatgaacagttcaggctggccccccgggggccgcgcgctggggctggaaatagctcattttgatcccgctacctcggccaggagcccagacctggcaactgatgcaaccagctgctcctgcagcaagaaagaagttagatgaccgttgggacggactgattggcccaactgatggaggaatagcggttagagagagggcagagcgcgccccccccccaacccgccccactgcccctgcaacagaaagaatggtagttagaccggggtcgggacaggacttctgcagcaagaaggcgcttaaaaagcgggacttttaagcgagggtactttagatcacctcctaaccgcaagcccagcctcagatccttcccattggtgcacggtcttgccaattactgctacactcggcaggttctccaatcaaacacgccctgtcgggcaggcagtcgtcccagccaatcctgaaacacctccctccgggtacttctgtttcctctctttcattggtcgccttggaggccgctcgcctccggcgcgggcacagagaggggcggggctgatagggcgttgctaagcgacggagatgcgcgcggggcctgttgggtgaaggagcagagcggccggaagcgcggagggagccgcgggatggaccgcaggtgaggccgatcgctcttccagggactacaggaggctggggaggaccaacggcgagagcagcacagcctaggacgggctggatacggtctggagtcgctagggctccaccgcactggaactacaattcccaacatgctccacagccgttggcctctccagccgtagccgttagcatcccgggggtcccctaagagtcttatgttcctctctgagtgggccccaaggaattattgcctctaaaggtgtccaagaaaggcttgagatctgaatttcttcattttgaaatggcccccagacacgcctgggcgttgtctttgaactttctcgcggaggcggagcccagtggatcctggggcttgtagtccatctaccctttgccttcgtgtcccccaggaatgtatgggaaatgctcggtgatataatccagccgcggttctttctttctttctttttttttaagacagagtctctcgctctgttggcccagactggagtgcagtggcacaatcttggctactgcaacctctgcccccgggttaaagcaattctcatgcctcagcctcccaggtagctgggactacaggcacctgccaccgcgcctggctaattttttatatttttagtagagacggggtttcgccatgttagta[134 bp omitted]gggacgctgcggaaaagacacggaggcccagccccactaatagatattctgattctgttggtctggaatgggaaccgcgcgcctgtaacgttgaaaagcccctcctagactggatccagggttgagaaccaccggctgtcagttcctgagttgctccctgttaagactgctccaggggcgggctcccaggactcacccttccactgtcgatatcctgaatgtgcaacggtgcttcatggaaatgacagtccgtctcctccaggaatctatgggaattgtctggttctgccctcctctaatgtccccctccccagggctgcggcgaaaccacgtgctgcctgaaccccactttcctcttgcagcctgccagttttctccattcaagatagtccctttggagatgcgcccctgggtcgaagccactactggccatcccagagccagacctggtgtcccaaggtgaggacacccctcaaagagtgctgagtgccagcccagtagcaagagaatgacctttagagggtaggaagacatgtgatgagagatagggatgagagatttaagagacagccccttgtcccctccccacggccctgcccttgtccccctctctaccacctggattccccatctgagcccccatcacactaggttgttatcattacaggatgtgtttcctcccctctggactgagactttgtgtgtgtcctggttcccctgcagggatgacccatgagacctcacactttttcttcttgtgctcttccctgatcttagaccctgagcccatccaggtctcagagatccaggctcccacaagctcccaaggctctagccacaggtcccaactcccctgagctgtttgaggagtcctggccatccagttcagggaccccctccctgcccagcaccactgagggacagatgtgggcctccccagcacccaccctgattgacagcggggactccgtggtggccaagtaagtaccagcagccctgggggaaaaagaggctttgggttagagggagggagaaggcatgcagtaataatcatcatggccagagctgtttctgcagcactcttttaggaccaggcagtttatgtgtgttaagaactctggtgctagactgcctgagttcaaatcccagctctgtcatttaactctctgtatgatcttggcctcagtttctttatctctttttatttatttatttatttgtttagagacagggtctcgctctgttactcaggctggaggtcagtggtacaatcacagctcactataacctcaaactcctgggctcaagccgtcctcccacctcagcctcctgagttgctgggattacgatgcatgccaccacacccagcaaacctcccaccttggcctccaaaaagtgctgtgattacaggccagacgtaccatgcccagcctcagtttatttatctctaaattgggtgttttgttttgttttgtttttgtttttgtttttttgatggagtttcactcttgttgcccaagttggaatgcagtggcatgatctcggcttactgcaacctctcccttctgggttcaagtgattctcctgcctcagcctcccaagtagctgggattacaggtgcccaccaccacacctggttaattttgtgtatttttagtagagatggggtttcaccatgttggccaggctggtctcaaactcctgacctcaggtgatccacctgcctcagcctcccaaagttctgggattacaggtgtgagccactgccaggcctaaattgggcatattaatagtacacatcccctagggctgttttgagctttcagtgagttactatatataatgatctctagcagtgcttctcacatagtcaccacttagatttgtagaatacaggttcagctgctgtaacaaagagtcccaaattaattatggctgaaacaagatagaatttattcctccctcacctgcagtccaggcagaagccaccagggatgatgtggcaacccgtagttgaggtgtcagggacacaggttacttctgtcttgttgctgtccgaactctaggccgttgccctttccttcatggtgcaaaatggctttcaaccacatcagctttccaaaatcacatttcataccctgtttgtcaagaacttagtcacgtggtcacaaggctacaagggtacctggtaaatatagtccataggagactggctgtgtgcccagctaaaagttacattcctggctgggcacagtgactcattcctgtaatcccagcactttgggaagccaaagtggcaggatcccttaagcccaggagttcctgaccagcctgggcaacatggcaagaccccgtttctactaaaaatacaaaaattggcagggctgcagtggctcacgcctgtaattccagcactttgggaggccaaagtgggtggatcacctgagatcaggagtttgagaccagcctgaccaacatggtgaaactccgtctctaccaaattagccgggcgtggtggtgcatgcctgtaatcccagtgacttgggaggctgaggcagaagaatcacttgaaccaggaggcagaggttgcagtgagccaagatcacgccattgcactctaacctgggcaacaagagcaaaactccgtctcaaaaaataaactaattaattacaaataaataaataaataaaaatacaaaaagtagccgagtgtggtggcatgcacctgtgtcccagctacccaggaggctgaggagagaggatttcttgagcccaggagttgggggctgcagtgagctatgattgcaccactgccctccagcctgggtgacagagcgagaccctgtctcaaaaacagttatgtgactatataagaaagaaaagcagatattgagggatagctaccaggctctgccatggtgcttggtaaacgttggctgctataattattcttattattatttggctctcctcactccactcacctcctatcccctgatgttcacaggtatataaacaggttccgccaggctcagcccaccagtcgagaggagcgccagcctgcaggcccaaccccagctgacttttggtggctgcagtctgactctccagaccccagcagtcaaagtgcagcaggtacctctttcagtgccatccactactcccacccctaaacctttgctgatcaatgcccccagcagccactcctcctggccctcatacctcaactggggcttctcagcaggagccaacaaaccagaaggaagaccccatacagctgtccctactgcggtcaacgtgaccagtgcatcccatgctgtggctccccttcaggaaataaagcaggtgacatccccattcactccctcccttgggtgcctgaactgacaacaccagccctaggacagaattagaagatcaggagcagtggctcacacctgtaatcccagcactttgggaggccaaggtgagaggactgcttgaggccaggagttcaagaccagcttgggtgacatggtgagattctgcctctactaaaaaaaaaaaaaaaaagagagagagagagagaaccaggtgtggtggtatgtacctgtaatcccagctacttgagagcctgaggctggaggatggcttgagcctaggagttcaaggctgctgtgagctatgatcatgccactgcactccagcctgggcagtagagcaagaccctgtctctatttaaaaaaaaaaaaaaaaaaaaagcctgggcaccgtggctcatgcctataatcccagcactttggtaggctgaggcaggcagatcacgaggtcaggagttcaggaccagcctgaccaacatggtgaaaccccgtctctactaaaaatacaaaaattagccgggcgtggtggtacacacctgtaatcccagctactcaggagcctgaggcaggagaattgcttgaacccgggagacggaggttgcagtgagccaagatagcgccagcgcactccagcctggcgacagcaagactccatctcaaaaaaaaaaaaaaaagaattagagctgatccccatttcaaggaagctaaaacagaaaaggaggatttgctggctaatgtaattgagaaatccaaaagtagatgtttccagatatgcctggatccaggtgtttgaataatgttgggagagacccaactctctctgggctccatgcccccccttttttttttgatacagagtcttgctctgtcacccaggctggggtacagtggcgccatctcagctcactgcaacctccgcctctcggggtcaagcaattcttctgcctcagcctcctgagtagctgggactacaggtgcatgccaccacacccagctaatttttttgtatttttttagtagagatgggatttcaccgtgttgcccaggcttgtctcgaactcctgacctccggcaatccgcccacctcagcctcccaaagtgctaggattataggcgtgaaccaccaagcccggccttttttttttttttttgagacggagtcttgtgctgtcatccaggctggagtgcagtggcgcgatctcggctcactgcaaaccccgcctcccaggttcacgccattctcctgcctcagcctcccgagtagctgggactacaggtgcctgccaccacgcccggctaatttttttttgtatttttagtagagatggggtttcaccatgttagccaggatggtctccatctcctgaccttgtgatccacccacctcggcctcccaaagtgctaggattacaggcatgagccaccgcgcccggccttctttttttttttttttaattagatagggtcttactcttaggctggagtgcagtggcacaatcatggctcactgcagccttgaactctttgcaaccttcgcctcctgagtacctgggactacagcatgcgccaccatgcccagctaattttttggtttttttgtagagatgggatcttactttgttgtcgaggctggtctcgaagtcctgggctcaagcaatcttcctgcctcggcctcctaaagtgctgggattgcaggcgtgagccaccacgcccgcctctgtgcttctctttttttgggctcagtcccaggcgggctttcccctcacaatagccaggatggtccttggggtctctaggctcccatggtcctggctcagtgactccagtgggaagtgggggcttttcgaattgctccatcagaagccccagggctcactgtgattcactcatccttgagccaaccactgtgaaccagaggatagaatgctctgatgaagcagctctgatctgggaggtgggat[133 bp omitted]tgaccaacatggagaagccctgtctctactaaaaatacaaaattagccgagcgtggtggcgcatgcctgtaatcccaggtacttgggaggctgaggcaggagaattgcttgaacccaggagatggaggttgctgtgagccgagatcgtgccattgcactccagcctgggcaacaagtgaaattcaatctcaaaaaaaaaaagaaaaaaaaaaaggtgctaatccaaaggggaaaactgggtctctcctccctgaggaggaggagcagatcctaagctggcatgtgaggttaccaagggcagtacaacctgcattccaggccctctgtttagaacccccttcccagcagcctttgggttggggctggcgtctgaccctgtcaccctgcagaacctccacacatggaactcatccctgctggacctggagacgctgagcctacagagcagagctgccaggctgctcaaacgcaggtgcccgcacccctgcccccatcacccttcctactgcggctccacgtggcccaggtctcgagacctccattgcctcactcctgccttctccctgcagcaaagcctccatctcctcctcctcctccctcagccccagcgatgccagcacttcctcattccccaccagctctgatggcctctctcccttctcggagaccttcatccctgactccagcaagggccttggccccagggcacccggtaagggctgagaggcaaagactgagggcagcctgggtgcaaatcccaactctgccactgaccagctatgggactttgggcctctctgggccttgtttctccagctgtaaaacagggataaggccagatgaggtgggtcaggcatggaggccgaggcgggcagattgcctgagctcaggagtttgagaccagcctggccaatgtggcgaaacccggtatctactaaaaatacaaaaattagccacgcgtggtacataatggtgcatagtggtgcatgcctgtagtcttagctactcagtaggctgaggcaggagaatcacttgaacctgggaggcggaggttgcagtgagccgagattgcgccattgcactccagcttgggcgacagagagagactccatctcaaaaataaataaataaatggtgccatcatagtccaattgctgggctcaagcaatcctataacctcagcctcctgagtagctgggactacaggcatgcaccactatgcccagctaattgtttttatttttttatttgttgagatgagggtctcactatgttgctcaggctgatctcaaactcctgggctcaagcgatccccccaccgccttcgcttcccaaagcactagggttataagaatgggccattcgttatgcccagctggttgttgcagttttgaatagggaagccagggaaggtgaccaagatctgatggatgtgagagaatgcaccgtgcgatacatgaaggaagagcattccaggcagagggaacgacaggtgtaaaaggcaaagccttcgccttttaccgggagagaggtgcagccaagggagggttcttaagtacgagaggcctggtctgactcaggtattcacaggctccctctggctgagagtagggaacagatttggaggagagtagagagaccagggaggctatttaagagtccaggttgggtgagtggggctggagcagggtgagggctgtagcgggtgggggagtgggtagattctggggaatatgtcttctggtcactgctgtaactccagtgtccagaacggctcaataaatatttgttgaatgaaaccaggcactgtgactcacgcctataatcccagcactttgggaggcccaggtgggatgatgatggcttgagcccaggagtttgagaccagcttgggcaacaaagcaagaccctgtctctacaaaaaaataaaaattacccccgtgtggtggcacacgccttttgtcccagctactcaggaggttaaggcaggaggatcgcctgagcccaggaggtcgagactgcagtgatcgcaccactgccctccagcctgggtgacagaacaagactatatatatataatgaacaaagacttgaatgatgacagatggagaagaccaggagtgctcgctcccctgactttgaccccttcccctcttcccaccccagagaggagctgggacagtatctggagagcctgtctgagtaaccccctgcacagttggagggcgtgtgtgcaggctgtcctggggttgctgatctccctggcccctgcctcaccctctcctctctacctccccctacagcatccccggcaccagcccaggcccagacccccacccctgctccagccccagcctcctcccaagcaccccttcggccagaggatgacattctgtaccagtggcggcagcggcggaagcttgaacaggctcagggaagcaagggtgacagagcttgggtgccgcctctgacccctgccctccgcacgttggtgagccgagggagggaggagcctggggggagctggaggaggggctgggtctgagggggactgaggaccctccaccctctctctctctgtctcagatctctcttatctgtctacagacctctcctgctccagtggagaccctcagttctctggggacccagcctaaccatgtcccactgtggagcagtgtggcccagcctggtccaccagaggccttctatgtggagaggcctccttttccctcagtgtcctctccacacatcttttgggcccccagctcccacgggttcttctgggccccacagtctgggccttgggtatcccttggggctgttcctcccacgcagcaggcctccaccctagcacatctgggctctaccctcgcgcccccggcttccctggcctccaccctcgaacccccggcctccaccccagctcccctggcctccacccttgcacccccagcctccaccccggctcccctggcctgtacccctgcacctccagcctccaccctcgcatccccagctgtcccccagggcctgcccatccctgacccaagcagctgtgcccagcctaagagcctggggcccaagtctcggaggagcagagcccctcgcccagaggctgccgagcaagtccctgcagctggccagggacctggccctcagctcaggggtgtcctgggccaggtagtggcagctcggctgttccctgacagcctggaggacacgcctcctcacttcgagggcccccctccacccaaggctggatctccgaaagtccaggccacacaaccccaaaccaaggtcactccccctccatctgaatcccagtgtcgggccaaggccgagtctctgaaagccaaggccttgccgcccgcagcggggtcagtgatacggaagagcgaagccactccttcccctggagcctgcctgcagcccgaggtcccactctctccagctgagcaggcaaccacagtcaaggcctcgccgccagccttccaggtggggtctccggaggccctggccccgcccccgcccgctgctgaccacgccccctcggaggccctgcttgcccaggccgccctgctgctgcaggctgcagaaggtgatgcccgcgccctcctggatgttggaggcaggccagccccctaagaggccggccccttggagctcattcttttctccccggcccagactccgacggcagcgagttccaggacgatcccgtgctgcaggtgctaagagcccatagggcagagctgagtcggcagaaaaggtgaccgaccctccatccccagagtctatgacactgggccccggagacctctgagacccggttaggcatccagccctcctcatcccctgtcccagcagtccgtccacagccccagattctaagcctgagcacataccccagcctctgctctcccggcctttctccagggaagcggatgcccgattatcgttcctgttggaccaggctgaagacctgggatcttggtcccctccagccgggtcgccccctaggtccccaaggaggctgctaagaagggaaggagattccctggaggccagaagactttgaattgtacagattctattttacccagtgaggctctttttttttttttcatacagttactggttatctgtgagaaaggggttgtttggaaaggccaaggggtcatgccaatttaaggaaatgccccccatcctccgctgccccatggctctgccctgccccccaccccttcctgaccacggaaacaagatctcctttctggttatatcttccttggggcagagggagtttcagacaagacttctggcaagactgggacccaccttatctggcttcactcaggagccctggctcaaatggaccaaaggactgccctccacggaggaagctactagggtcatcagagtgttggatgatggtcaggctatagcccacacatgcttgagcagcagcagcatctggtgcagctgacccctccctccttgaagcactttctctccctgcttccagcccttctctctgcacctctctggtcaggcctagtcactagcccagcatgtcaactttggcatgacccagggccatggcgttgacatctctatctgcacccacccataggtgctcttgtctagcttaatgactctaaaccccgtctctattctgataatcctcaaatttctgtctgtaacctagacctggccacgaaaccttgggctcctacctcattaccatttctacccaagggtttaaaagacatctcaaattccataggtcctaaatggagtttccaatctttccccctaggcgtgcctctccccagcttctttttttttttttttttggatggagtctagctctgtcacccaggctggagtgccatagtgtgatctcggctcactgcaagcttcgcctcccgggttcacgccattctcctgcctcagcctcccgagtagctgggactacaggtgcccgccaccacggtcggctaattttttttgtatttttagtagagacggggtttcactgtgttagccaggatggtcttggtctcctgacctcgtgatccacccgcctcggcctcccaaagtgctgggattgcaggcgtgagccaccgtgctgggccccccctccccaactttcttcggctctgtcctttgccgctcagaccaaaaaccttagagttgtctttgacttctgtctttcccttccacccacagttaaccaggaaatcctgccatctccgcctttattttattttattttttgagatggagtttcacccttgttgcccaggctgtagtacaatggcatgatctcggctcacggcaacctccacctcccgggttcaagcgattctcctgcctcagccttctgagtagctgggattacaggcacctgccaccacgcccagctaattttctttgtttgtttgtttgttttgagacagagtcttgctctgtcccccaggctggagggcagtggcacgatctcggctcactgcaacctctgccttgcaggttcaagctattcttctgcctcagcctccctagtagctgggactacaggcgtgtgccaccacgcctggctaatttttgtatttttagtagagacggggtttcaccatattggccaggctggtctcaaactcatgacctcgtgatcctcctgcctcagcctcccaaagcgctgggattacaggcatgagccatcatgcctggcaattttttgtatttttagtagagacgaggtttcaccatgttggccaggctggtctcgaactcctaacctcaggtgtcccacccacctcagcctcccaaagtgctaggattacagatgtgagccaccgcacctggcctccacctttaaaatctatccagaattcaactgcttctccccttctactgctcacacctcaatctaggctgtcatcacctcctctctggactgttggaaaacttaacggtttttataaacctgatattctttgacacacttgccatcaagaggcagagtctatgtcccttcatcttgaaactgggcccctcaacaaataaaatgcagaggaagtgatgc[138 bp omitted]atggtgaaatgtctctactaaaaatacaaaaattggccaggcattggtggtgggtgcctgtaatcccagctactcaggaggctgaggcaagagaattgcttgaactcagaaggcagaggttgcagtggaaaaaaaaaaaaagataatttctctctctttctctctctctctgacacttgctttagaggctacattaaaaaaaaaaactagttgccatgctggggaggggtttgggttacacaggtgtatgcacttatgaaacttagtgaagtgtgtgaatttcattgtatgtaaagtttacctcaaaagaaaatattgaacgccagttaaagatacgcctgtaatctgacttctttgggaggccaaggcgggaggatcacttgaggccaggagtttgagactaccctgggcaacacagcaagacctgtctctacaaaaataaataagtaaataaatagccagatgtggtggcacacgatttgcagtcccattactaggggcggggaggggcgctgaggcaggaggtttacttgagcccaggagttcaaggctgtattgtagtgaactaagatcatgccactgcactccagcctgggctacagagctagaccctgtctttaaaaaaaagaaaagaaaaaaaaaagtatgtacactgaaatatttagggaacaataaaccaatgtcgacaatttattttgaaatgcatccagagatgagttggattgatggataaatagtgtaataggtagatgtgagataaagcaaatacagcaaagtgttcatggtaggatctaagtggcggatatgcgggtgtccactgtaaaatttttcaactttgctgtaatttagaaacttttcatggccgggcgcggtgactcatgcctgtaatcccagcactttgggaggccaaggcgggcggatcacgaggtcaggagatcgagaccatcctggctaacacggtgaaaccccgtctctactaaaaatacaaaaaattagccgggcgtggtggcgggcgcctgtagccccagctactcggaaggctgaggcaggagaatcacttgaacctgggaggcagagcttgcagtgagccgagattgcgccactgcactccagcctgggtgacagagcgagactccgtctcagaaaagaaacttttcataataaaatgatggagaatatatgattggggttgttttgatatctgcatttacaaaatggagggataagatggatttctagtaacttctgtatgtcacatggtaaatataatatttgttttcaacctttctttctttctttttttttttttttttttttgagatggagtcttgctctgtcacccaggctggagtgtagtggtgcaacctcggctcactgtaacctctgccttccaggttcaagtgattctccttcctcagctttccgagtagttgagattataggtgcatgccacctcacctggctaatttgtgtgtgtgtgtgtgtttttagtagagacagggtttcaccatgttggtctggctggtctcgaactcctgacctcatgatccacctgccccggcctcccaaagtgctgggattacaggtgtgaggcaccgcacccggcctgtttctaacctttctaagcaaaccatacatttaaatgaaatcagagtgggcacagtggcacaggcctgtaatctcagcactttgggaggccaaggcgagcagatcacttgaggtcacgagttagagaccagcctgggcaatatagtgaaactctgtctccactaaaaattagctgggcctggtggcgggtgcctgtagtcccaggtgctcaggaggctgaggcaggagaattgcttgaacatgggaggcggaggctgcagtgagttgagatggtgccactgcacttcagcctgggcaacagagtgagactccatctcaaaaacaaacaaactaacaaaaaaatgtaattgacaagaaaaatagctgtttagatataaggagaaataaaagatactatagtagcagaacctgatctagctgggtcacgggtggggtctagaagcattcctgaggaagttacacttaagctgagacaggtagaaattatctagttaacaaagggctgtcctaattactctagttggataaccgctcccaaaacttagtggcataaaacaattattttattatgctcatggattctgagagtcagaggtttggacagggctcatatggggacaatttttgtctcctccatgatgtctggggattcacctggaaagactcaaaggtgacttgatagacttgatggctgtggagtagaatcctccagaacttcttccgtggtcttctcccagtctgactgggactattgactaatgcctatacatagctccattggcctgggcttcctcaaagcatgtctgcttcagcatagtcacacttcgcatatgatgcaccatggttctacagctcattccagtggacgagaacattggtcaagaagctgcattgcctttcatcacatagccttagaaatcaccgtgtcacttccactgttttctattggttgaagctatcctagtcccacccagattcatagaaagcaatcatagagtccgcgtcttgataagaagagtgtcagagaatttgcagctgttttaaaatcactgcaggaccccattctccatgatgtgattattacacattgcatgcctgtatcaaaacatctcatgtgccccctcaatatatatacctaaatatacctgttatgtacccagaaaaattaaaaaataaaaaaaaaaatcactgcaggggttgatggggaaacactagacagaaggaatatcgtgtgggaaatccctgtgatgagagtgaggtcagcaaatttagtacataagtaactgcacattcacctctccctcagcactccctttcaccagcccttgcttaattattctccatagaatgaatcaccttctaatattttttttttttttcagacagagtcttgctctgtctcccaggctggagtgcagtggcaaaatctcggctgactgcaacctccgcctcctgggttcaagcaattctcctgtctcaggctcctgagtagctgggattacaggcacacgccaccacacctggctaattttaatatttgtatttttagtagagacggggtttcagcatattggccaggctggtctcgaactcctgaccttgtgatcctcccgcctcggcctcccaaagtgctggggttacaggcgtgagccactgtccccagctttttttttttttttttttttttttttttgagacagagtctcacttcaacacctaagctggagtgcagtggcgcgatctcggctcacagcaaactctgccacctgggttcaacccattgtcttgcctcagcctcccaggtagctgggattacaggcacgcccgccgccacacctggctaatttttgtatttttagtagagacggggtttctccatgctggccatgctggtgtcgaactcctgacctcaagtgatctgcccgcctcggcctcccaaagtgttgggattacaggcgtgagccaccacgcctggcctaatattctatattttgtttaatgttaattttgttcattgtcttctcccagtagcttttgagctccaatgtgggcagggtatattttctcctggtttggttgttgatgtatgtacaaattgattagagtttgagtgaatgaatgaatgaatgaatgaatgaacagaccaagaccctctgagatgagaatttgttgagggcatgactaaggagagaccctcctgtgaagggcgttattacagtgttatctgggcatgctcagtattagcaggctccattgggaatggctttatggggggcataagcatgatctggcatttccccctaagcattttcctagaaaaaaaaaatcaaggctggagattggcccgtaataagcagtagaaggggaaacaagaaaatgtccagtgggcaggggaggccaaatcgcagaaagcctcgggttacgtcctaggcaaggtatatgaggcaacgagaaacgtccatgggcggagcgtcctcggcattatgtgagcggggtcgggatcaggactgaaaaggtgagacttgggactgggactttgaaaagctgcttaaggaactgggcactgctctgaggccgtgggagaatccaattaagactatcaggggctggctggcgtggtggctcacgcctgtcatcccagcgctttgaaaggaggctgaggagggagtatctcttgagccccagagatcaagaccatcctgggtaacatagtgagacccccatgtctaaaaaaaattagccaggcgtggtagcgcacgcctgtagtcccagctacatgggaggtatcgcttgagcccaggaggttgaggctgcagtaagccacgattgcaggactgcgctccagcctgggcgacagagtgagaccctgtctcttaaagaaataaaaataaaaaagtcagaagaatggacactgggagtggacgaaaggtagggtccattgcttggtgttggaagtgtcggaagcaaagcataaagaacctgggggcttgtctcaggagggcgatgacagccaatgaaaagcagtcatgggcgtggcgctgtcaaacttcgaggggcgggaccgaggacacagagccggggcggagcccaaggtgaaaccaatgagaagcctccgggtgggcggggcatcggcctaaggccaagggcggagccaatgagaagcagcgccgcgttcccgctgccccccgcccccgtggggcgcgcgccggagccacgggcagccgttaggggcggggtctgcagccgcccgcgcgcggctcgcgccctcccctttgtgtcgccatggcggcggcagcggcgacgagaacggcgagcgaggggtcgagcgcggccggggcctgaggaggctacgcgaccatggtggtaagggtcccacgcggccgtcagcctgtccgtccggatgtcagtctgtccgtgcgcagccccgccccgcgcgccccgcccccggccccgcccgatcccgcggcctgtgcttcagccgtggtccctcccgtcctgcggccccatcccgggtcccagcccgtacctcgaccccgccccctaagcgcgcatccccgtcttccacgccctggatggggtgacagggacctagggcctgggctgggaggaggcggggctagtccaggaagggacccgcgccacccaagtggcccctgcaggggcctcctgaggctcctgggtccttccccagctcccatcccagcaccttcctcggcatccttctgccagccctcagccctccccggcggagccccctcctcctccccacagcccctttctcattcccgagccccaccccccacccgctccatccccagcctgacccttttcttctccttctccctcattttcaccctatcccagttcctctcaatcccccccgccccgcatcagtctgagcctttgcctcgtctctccagccactccttccttactccaccccaacaggccagcactgtacctcccttgatcctcgggtctgctccatctccttgtcctcatccccctcccccaccatttccctctcccaccatgctgctcccgctcattcatccattcattccctcacttagcagacattcactgagaccgcctctgtgcaggccccacgctccaggcacagagagagtcagctcccatcctgccttggggaaccttatgggctggagggggacagaccctgagggtgagaccctgagggtgactgggggttgcagggacatggagcagggagacgctacagcccagtgaatctgtctggcagctggttaatttattcatcagattttacccagtccctgctgcgcgcgactgggctggcactggggacccagaaaagaatcaggaacaatcatgtctgaacaccaactcaatgcccagctctatgctggggagctcagtctggggccctccttctgggaggccggtcatagtccaatgagagagatgaacttgtcaccaccagtgccatctcagagtgatcagagctgtgaagggagaagctctggtcaaggcatggaacctgggatgggggaacctcaggggatggagagagtccagaggagatgccaggtgcagcctgaagggtcagggagaacttcctggaggagggcacatgtgagttgggacctgaggggtgggagtgaggatgaatgtacccagggaaaggtggggcgagtgttccaggctgagggaacagcctttgcaaaggcctagaaggaaatgagaagagggtgctttttttggactcttagaagttcaagagctctgagagtgggggcaatgggaagagatgggactggagaggtaaacagaaatcagctcagggaagtctcgattatcagaccagagaattcagacttcgtcttgaagacaacagggagtcattgaaggcccaggatctatggagaaatagagccagatttgtgttttctgaaaacgatccaggctattgcggaaaagctggcaggaggggagaggctggaagcaggaaggctgatgagatgggagttgtgattgtctagacagtggtaggagatcactgtactctgcaggggctacggaagggttttcagcagggagagatgggaccagcatgctctccatcctgttgccccgcctcacgtctggcccctgcttctccagtcccccaccccagaccacacacgaagaagcagtcctgtcctcagcccagccctcacctcccccgacctgccatcctgcttcatgctcagggcggtgtgtggagcgcccggggctctggacccgcgctgccagataacaatgctctcgttgtctctttgctcccatctctgggggcctctgattctttctgctctacaggcacgcagcactgacagcctggatggcccaggggagggctcggtgcagcctctacccactgctggggggcccagtgtgaaggggaagcctgggaagaggtgagggtgagggaggaaagggctcagctaggagctggggagactcaaggagctgctggtgacgcatcccctgtctcccaggctctcagctcctcgaggccccttcccgcggctggctgactgcgcccatttccactacgagaacgttgactttggccacattcaggtatgggggctttgcatttgcacccaggagggaagacaatatcctacccaaccttgcaacgatatcaggtgctttgcttctgaaacttatccctgtgactggctgctgcacgcgtctgagcagtcagtagcaaaagttgcaggagccacagcagatggggagagctgctcattcattcatccatttgttcttttattcattcaacaacaacttttgttaggtatctgctctatgtcagggaccaggacatcaccaggccctgtcctcggggaggtccagaagggagtcacaaacccgtccctagatagtgccatccccaggaggtcaggactgggacaaaagtccacctgggccttgctttccctctgcagctcctgctgtctccagaccgtgaagggcccagcctctctggagagaatgagctggtgttcggggtgcaggtgacctgtcaggtgaggccatcccgcctctcatctagcctgagagaatggccactgtagtcctcagctcggtgtcatggggcccctgctcccttctgtccctctgctcccacagggccgttcctggccggttctccggagttacgatgactttcgttccctggatgcccacctccaccggtgcatatttgaccggaggttctcctgccttccggagcttcccccgccccccgagggtgccagggctgcccaggtaacctgcttgttgtctcagcccctgcctcatgagtgtgtcctcatccacagtgtgaaatcatcaaggcagcgggatagagaaatatttaaatactggtatggcccaagtcccaaccaatctgaatgaatggagaagccttagaaacgtagtaggcttctgctacatttagctttgctaagttttaggatcatggggagttccagggggtcccatgggagggtcaccatggtcatgccaaccagggtactcaagagcttggcccagcctgcttattcattcatatgcccatatctcagtacctaacagctgagcagcacccatgtgttcaggatgaacttcagcccagagacgagctagggcagtgtgggagggcagtgggctctctcacgtccactcacagaggcccactctgacaacctgcccccagatgctggtgccactgctgctgcagtacctggagacactgtcaggactggtggacagtaacctcaactgcgggcctgtgctcacctggatggaggtgggcctgggcagggggcttggagattccgagtgggtgagggggtgtctgaggggcgagaagcagcctcggtgtgtgtgtgggcatagaaaagaaaggagccagagtggaggaggcgttgatattttagtgtctgtgtgggcgcatgcctgtgagagaatgtgtgtgagcatgtgtgtgtgtgcacgtgtgtgtgttagcaggtgttcggctttaaggatacaagggtttaaatgtatatcagttagaaatgggttgggctgtaactcacagaacacctggctatgagtggcttaaaccagaggggttttttttcttttcttgagatggagttttactcttgttgcccaggctggagtgcagtggcatgatctcgcccaccacaacccctgcctcccaggttcaagtgattcttttgcctcagcctcctgagtagctgggattacaggcatgtgccaccacgcccggctaattttatattttcagtagagactgggtttctccatgttggtcagactggtctcaaactcctgacctcaggtgttccgcccacctcagcctcctaaagtgttgggattataggcatgagccactgtgcctggcctctggctaattaaaaaaaaatgttttgtagagacagagttttgctatgttgaccaggctggtcttgaactcctggggtcaagcaattctccaggctcaccctcccaaagtgctgggattacaggcgtgtgccaccacgcccagcacagagagattttagatggcaaccgtgtggcatctgctgtggaggatgaaggtgcagaggtggatggggaagccttcaggtggggaagcctttgggtgggagagtcctgggacatgtgaggggaaataaaggggtttttcttagaggtttccccacccgcagagggtgccagggctgcatccctacaaacaggaatctaggtgtttgaccaatagctctgagtgacaggggctcttgacgggggcgggcagtggcctcacccagcgcggaggagcttggtatgcctgcactaacaccgtcttctgacctgtccttgccacattccacctctatttcagctggacaatcacggccggcgactgctcctcagtgaggaggcgtcactcaatatccctgcagtggcggccgcccatgtgatcaaacggtatacagcccaggcgccagatgagctgtcctttgaggtgaggctgtggggaagcagattccagctgggctccccacaccccctgctccttctgacccttctcttcccacccgccctctcccaggtgggagacattgtctcggtgatcgacatgccacccacagaggatcggagctggtggcggggcaagcgaggcttccaggtgagtccagctgggcgcggacaggtggggctggggtacctgccaactggggtggcccagctactgaccctgaccttcctcaggtcgggttcttccccagtgagtgtgtggaactcttcacagagcggccaggtccgggcctgaaggcgggtaagtgccatggatggatgggaggtgtggggaggggtgggaaggggtggggcctcctgcgtcttttgcctcccactcatcccttccaccccatttttcgcctagcagatgccgatggccccccatgtggcatcccggctccccagggtatctcgtctctgacctcaggtaatagaaataggcggtcaggtcccagcccctaccccaccaggcccctggccatgctgaccccacaagacctgcctttgccctttgccccttgcccccacagctgtgccacggcctcgtgggaagctggccggcctgctccgcaccttcatgcgctcccgcccttctcggcagcggctgcggcagcggggaatcctgcgacagagggtgtttggctgcgatcttggcgagcacctcagcaactcaggccaggatggtgaggccggggcccacccaccccacccgtcacaccagggctgcggcccacccagccctgaccttgctttctcccagtgccccaggtgctgcgctgctgctccgagttcattgaggcccacggggtggtggatgggatctaccggctctcaggcgtgtcttccaacatccagaggcttcggtgagggcccttagccaaccctgtccttccacaggcactcacccagcacctccactccagccccgtgctgcatgctggggacacagttaccaggagtcaggagtggcaggatcaaggctggggtcagggacagctctcttgagagtagagttagcagtctaagcgaggactatcttcaccgagcacctgccacgtgccaggcactgttctaggcactggggacgcagcagtgagtgagacagccagaaacccctgccctcatagggcccatgggctagaggaagagacaaacaggggagggatagagttcaccagaagatgacaggtactatggaggaaaacagattggggtaaggaggatggcgacgaagagccaagagggaggcctgcagttttggatggcaagggcagagccacctcatgcgagggtctggaggaggggaggggcaggccatgcagagggagcagcagggcaaagggaacagcaacaggaggccatggccaaggagtccccgtgccagcgcaggcaaagccttcatgttagggttttggcttttactataagtgaagggggaaccgcaggagggctctgagccggggcggggtctagaggcggggaggagccaggcgagatctcggcctgcaggaggctgagaggggagtgcttgaagcctgcaggggggtggccaagagggaggcaggaggtggcaatgggtgggagattttaccacaggcagtggggccccaccagagaattgggagtagcagggtgctgggattttgtccacattttccagtgccctcttacagccaggagaatggcagctgcatggtaggagctgctcatgctctggagtcagacagtcttgggtagctgcaggcagaggcacctctgtctgagcctcagcatcctcctctgtaaatgcggcacccttctctttgccacacaggcttgctggggagttcagtaaggttctgcctctgaagagcccagtgtaggacctggggaagagggttccatccacctgcgggcacttgggggtaggggcaaggggagcatggccacgtgagcgagcccctctgacctggatcttcctcctccttgacacggtggtctcaggcacgagtttgacagtgagaggatcccggagctgtctggccctgcattcctgcaggacatccacagcgtgtcctccctctgcaagctctacttccgagagcttccgaaccctctgctcacctaccagctctatgggaagttcagtgtgagtaagggagctggcgggacggagggggccgggacgcctctggcccagacctcatcacacctgcccaccatctcaggaggccatgtcagtgcctggggaggaggagcgtctggtgcgggtgcacgatgtcatccagcagctgcccccaccacattacaggtaaaccaggaggggcagggcgggacttggtgggattccaagggggttgaggctcaggtgccccctctgctcccacccccaggaccctggagtacctgctgaggcacctggcccgcatggcgagacacagtgccaacaccagcatgcatgcccgcaacctggccattgtctgggcacccaacctgctacggtgagctgcttgctcgcctgcctgcccctcaggtctttccccaaaaccaccccaggaacccgcccagcttttcttttgtttattcatcgaatacgtgtctatcaaatacctcccatggacctggccccgtccctagcactggggacccagcactgagcatggccctgtcctcctgggactcatgttctcatggaggagatggaccatgaacatcaacaggaaaaatacagagtaaagtctgatggtgatgagtgctgaggaggagagaggaggagggaagggcagtgtgcagggtcagggcagtgtgaagtttttagcgagagtggcaagggaggctttggcaggtcttctgtggccagcagcagaataagcctggaggatttgatggtgaacgagacaggcatgatctctcccctgccggagttcacagtcttctgggggcacagatacataaacaagtaaaacaggtggtatgtcagaggacgggcgtaagatgtacggagaaaaataaacgagaaaggccaggggtacagagaagggagtgtacagttttgaataaagtgggtgaggaagactgcactaagaaggcaatatttgagtcaagacctgcagaggatgagggagggccccaggtgcgcacgtggggagtgacaggctgagggaacggcaggtgcagacatctgggcctgggccggtgcctggtgtgttggaggagctgcagggaggccggtgtggctggagctgagtgagtgaggggctgagggagaggagatgatgaggtcagagaggtgacggggaccagacagaggggtgactcacaggtcatgggtcacagtgaggactttgctcttgcctggagcgaggtgcagccagggcagggctctgagccaggcgggccctgatggaactcaggtggtctcaggctccctctggctgcaggtgggagcatactttagggtggggaccggaaggaggctctgggatgtccaggctgggggagatggaggctgggccagatggggggcagtggagggggtgacagattgattgtgggagttaaagaggggggctcagggcaaccccaaggtgtttggccagagccacaggaagaaccacactgagatggggaaggcaggaggggcgggtctgggggaaggttgagagcccagcgaggcgtgatcagtttgaggtcagaggtgttgaatagacagtcactgcctcccctggctcccctcattgccctgccagaacctgctggctgggctcaaggcacccagcctccctcccgctcctcccacccaggtccatggagctggagtcagtgggaatgggtggcgcggcggcgttccgggaagttcgggtgcagtcggtggtggtggagtttctgctcacccatgtggacgtcctgttcagcgacaccttcacctccgccggcctcgaccctgcaggtatgccctcccaccccctgaggtcctggctactgcccaccacgatcagggctgcagggggagggcaggtgggctcccagtcccgtccccaccccactgaagctgggcctccctccggctccttgaggatcccgccccggcctctccctccccgcgcccccctccttctcatttcagctcctccgctcaggattcccacctcttggcccggacgccgctcttccttcaccccttgtagctcctgggggcgcttggggccatgggtccacctgggaggaggtgggaggtccccagacttgaccccgccccggccccacccagactccccgccctgccccggaccccagcccagtcaggactcagcacgtcggagggccctctggcccgaggtaactgaagccagagccgctgccctcgctggctgccgggagctgcctcctcatcagctcgtcccgccccgccctcctcccacctgcctgctgcccgcctgctcccgcctgatccgccccggccccctgccttgccagcccgggtgggcatgctgcggggccggggcttgggctgtggcgcttggctttgcctgtggccttgggcggccccagagctgacagctgccccctttccacactccccaggccgctgcctgctccccaggcccaagtcccttgcgggcagctgcccctccacccgcctgctgacgctggaggaagcccaggcacgcacccagggccggctggggacgcccacggagcccacaactcccaaggccccggcctcacctgcggaaaggtgagtgggatgctgggggtggcgaggggcaggtggaggcctggttcctcagacggcctcctgtttctcccccaaaccgcaggaggaaaggggagagaggggagaagcagcggaagccagggggcagcagctggaagacgttctttgcactgggccggggccccagtgtccctcgaaagaagcccctgccctggctggggggcacccgtgccccaccgcagccttcaggtgagaggctgagccatgggctggtgggcagcgatggtcgctggagtgccctcctacctctccctctcctgcaggcagcagacccgacaccgtcacactgagatctgccaagagcgaggagtctctgtcatcgcaggccagcggggctggtgagcaaggcgggcaattggggggcgctacctgtgcccatgtggagccgggaggaattggggccctggtttggcctccaaattttatacttcacatttgggggccctggggcttttgaaaaatttaacctggcctttatgtacaatgagttggatacagtatcacctttggttcatcacacactgaacttaacttactcattggtccatgacgggccctttaaaagtctttattattcctgttgaacattttaaaataatatcatggacacccatgaacccagcagccagaactagagcagccccattccttctccccttcgagttcctccccactggaggcatcctctcaatttgcagactaccctgcccttgctttccaggtctgatcatacacaggtgtgtgtgtaaggatcatactgctcagttctagccattttggaaacttgatttaaagggcgttgtaagaaagggatgccgcactgtatggggagcttggctttttctccatcgctacctcacagcccgccgcgctgctgggtgctgctctccgacctctgcggggggctgcttatccaccccacccagccgtgcctctgggggctcttctgagccaccgcgccatcctcacactcctggggtactgccctcccacatacccaggagcccaggtgctgtcctgctggctcagcagctgtatgtgaatctgttggtctcgtgctcacagcctgtggggcagccacagggccttcgtgctttgggccggaagtgtcctcttcatggtctccactgtcaatctgaacagctcttcctggcttcacactactgtggccctctccaggaggcgcctcttcatgtcctttccccagctttctgtggggctgtgcgccctgttctcagggatggtctcactgaccccacccctccaggcctccagaggctgcacaggctgcggcgaccccactccagcagcgacgctttccctgtgggcccagcacctgctggctcctgcgagagcctgtcctcgtcctcctcctccgagtcctcctcctctgagtcctcctcttcctcctctgagtcctcagcagctgggctgggggcactctctgggtctccctcacaccgtacctcagcctggctagatgatggtgatgagctggacttcagcccaccccgctgcctggagggactccgggggctggactttgatcccttaaccttccgctgcagcagccccaccccaggggatcccgcacctcccgccagcccagcaccccccgcccctgcctctgccttcccacccagggtgaccccccaggccatctcgccccgggggcccaccagccccgcctcgcctgctgccctagacatctcagagcccctggctgtatcagtgccacccgctgtcctagaactgctgggggctgggggagcacctgcctcagccaccccaacaccagctctcagccccggccggagcctgcgcccccatctcatacccctgctgctgcgaggagccgaggccccgctgactgacgcctgccagcaggagatgtgcagcaagctccggggagcccagggcccactcggtgagtcctcagcctaccccacccctgtccccgccagctgtcactgactctgagggcctggccccagctgaacccctctccattcatttatataggtcctgatatggagtcaccactgccaccccctcccctgtctctcctgcgccctgggggtgccccacccccgccccctaagaacccagcacgcctcatggccctggccctggctgagcgggctcagcaggtggccgagcaacagagccagcaggagtgtgggggcaccccacctgcttcccaatcccccttccaccgctcgctgtctctggaggtgggcggggagcccctggggacctcagggagtgggccacctcccaactccctagcacacccgggtgcctgggtcccgggacccccaccctacttaccaaggcaacaaagtgatgggagcctgctgaggagccagcggcccatggggacctcaaggaggggactccgaggccctgcccaggtcagtgcccagctcagggcaggtggcgggggcagggatgcgccagaggcagcagcccagtccccatgttctgtcccctcacaggttcctacccccggcttcttctccccagcccccagggagtgcctgccacccttcctcggggtccccaagccaggcttgtaccccctgggccccccatccttccagcccagttccccagccccagtctggaggagctctctgggcccccctgcaccactcgacaggggagagaacctgtactatgagatcggggcaagtgaggggtccccctattctggccccacccgctcctggagtccctttcgctccatgccccccgacaggctcaatgcctcctacggcatgcttggccaatcacccccactccacaggtcccccgacttcctgctcagctacccgccagccccctcctgctttccccctgaccaccttggctactcagccccccagcaccctgctcggcgccctacaccgcctgagcccctctacgtcaacctagctctagggcccaggggtccctcacctgcctcttcctcctcctcttcccctcctgcccacccccgaagccgttcagatcccggtcccccagtcccccgccttccccagaaacaacgggcaccctggggaccccgtacccctcatagggtgccgggtccctggggccctcctgagcctctcctgctctacagggcagccccgccagcctacggaagggggggcgagctccaccgagggtccttgtacagaaatggagggcaaagaggggagggggctggtcccccacccccttaccccactcccagctggtccctccactctgagggccagacccgaagctactgctgagcaccagctgggaggggccgtccttccttcccttcaccctcactggatcttggcccaaccaaatcccttgttttgtattttcttgaaccccgaccactaccccaggtttctaactttgtaacttgcttctgatgtgggtccctaacctataatctcagcttccctaccctggactgaagggtctgcccatccccccaccaccctccatcctgggggccctcgcacaaatctggggtgggaggggctaggctgaccccatcctcctctccctccaggagcccccagcatgtcctgacctgtgcacggggatggggggacaactcctacccttctttccccacatgccccactaaaccatctgacaacattaatgaataaaatggtgaaaatgtggctgctgaagtcgttctggggccaaactcagtgagtgaagacagacagagggggcactttatcattctatttccttttggggaggcaccaaggcaggagttactcctgggagcctctgagaggtggtatctgcagagaggggaaccatgggcaccctgggagtctaggtcaggagtggggctcaggctgggcttttctccaagctgacatcctttttgtagctctgctatgatctcctccagcaggtccatcctggggagcagtgaggcacaggtagacctagggttacctcagggataaagacctagggttacctggggtcctcccatccaaggcctcgggtctcacttctgcaggctggagaagagacctcctctagtcagctcagtaccgggtgcctgcaggagagaaggctggagctgccacctggtagccatggtgctccagcgggcctgggagggcagatggggcacaggctgagctcggggtcctctgcttagcctgccctcgtggccttccctgccagcagcctcccagtgtgtgggaagcctccctgtgggtcagcaggctggggatgggctcacagggctggggctccagcagaataaccctgtgtgtgcgccgcagcagcccctgcagggctggaatcttggctgagagcttcctcaaactgttccgcagagctctgggtccccagcagggaggctgagtcctagaggctggagttggagtgcagggaagggccctgggggaagcagggttggttaagggtcataggtgagtgaggggacagttgggcgaccctaaagttccctggtcaaaggagaggcagccagggaacttcgggttggtgactcctggagggcgggcggagggggtcacaggttagcagtgggacagttgtgcagggctctgggggtatctgtactgttgagctgggctccaggcagcagtgcaggctgaccctggctgtggggctgtggccagacccagggctgggtcctgggctgggcccagagctgctgcctagagtcaagctgctgcccaagttccaggctgcaccccttgggatcctgctgtggtctctgacctcaggagtctcaggcctgcagagaaggatggcagagagctggcatgggttgcccaggtgtcccacagctcccttggtcccccacagccccgtcctggctcctacctggcatgggatggggcctggggacatcacaggggccacaggcctgggtgtggtcttggctctgtgagccacttgatgtacagtttctctgtggggacagaccagttggtcagcacctgccagcatcccttccttgccctctaacttggtggggaaccctggggtgcaggggatagcgtggtccactccattggggagctcacctcaggagccacgtcctgtggaccggaggctgggtgtggggacacaggcttgcctggggtcccatggccaccacccaccccctgctgacctgccctgtacctgggccggggcctcccgcagtaggtatcgggtactctgcaggctgccccagcggtcagcaggtgctaggcctagcccagctcgaatcagggcctggtagggtgctggcacccggggctccagggccggactctcccctgcctccagcttggccttcacctcaggtccccctctcccagcccagggcagctctcctgccaggaagcacagttagggacccaagcgggagggtgccttcatggggtggggcgcagccactcactcaccagtgaagacctcctggatcaggatgcagaagctgtagaggtctgaggtggtggtgggcatgtcaccgcagatcagctgaagtggcagccatgggtgtagttcagggggcgggggaagccctgggcctgggcctccccaggggtagcccttctgctgcctgtggagcccaagggccctggtgagccgacggctgctggacagggacctgcacccgccaccagacaggaaaactgagaccccaggtcacacagcccagcagtggtagggccagcacctagctcctatgccactcacagtgcccctctccacccccacctcctccctggggtctacaagacaccactgcccatggccacggaggctggagaacagggaggaggggagcgtgcaggcccgagtcaaggggcagcaggcagggcaggcactcacctgggccgcagccagcgctggcgtaggaggcgcctgtgctccaggtggcccactttagccaggcctggctgcaccagctacacggtgtgagagctgaagccactgtgagctcgccagtgggcctgcaggaacagcagggcctttagcacctgctgcagcagggggccggggcggcaggcccagcacagtcccaggtgcctcctcacttggtctcggtgggtgcagcaccccctgcagggagcccagccacacaggctcaaagagaaggcacagccccgacagatctgcagagggactcagtgccatcagcagcaacaggccagggtggtgcagcttgctgggcaggaggacagcaggccactcacgagcaggccccagccacacagggtgggagatgctcctgggcccagactgcccaccacgtgccagggcaggcaatctgcacctgccatcagacagaggaaagactgatcccaggtcacgcagcccagcagtgggagggccagcacccaccgcctacctcatcctggtgccttccacacccccacctcctctcaggcctacagggcattgcacacacaactggtacccacccactttccagtggggggatcgccccagcagaagggctccatgccgggtgctggcccagaagtgaagattctggccatgactacggccacacacccttgtcttccgtgggagggccaacaggaggcggggctgggggctggcacaggtacctgcagtgctgaaggtcagccagtagcacatctgtctgggttccaggggccttcggctgctgcacagtcattttgtgacccatccacaggaggctggagaataggggcggggcagtacaggcctgagacgagggggctttccctgggaggggagcaggagagctggcaagggcacagcggggctctcacttggccatgagggtggggagctgctctcataggtgcagtcaggctctccctgggctgccagcagctccttggggtccacaagggggatgcccgttaccagccccggtggccacaggctactcagctagggacaggcaggatcatgaggcacgaagaagacaggggtggttcccactcctacagccactcctgcttacctgaccaaaccccaaggccgggacttgggaggctctcctgatctgtgctagcctcagcatcctggggtgggggcaggccgagggtaagtctggggtggctgggaatggttgggcgggtgggcttcaggatgtggacggttacctgtctgcctgcatcagcctcagggaggacagggagccaggcgggctgttcccaaatctggcctgcaactggtccagagatgccatgggtggcaactcaccgtcatgcacgaacgctgatatgtgggcccggcagagctgcaacaactccagcaactggaggagggcacgtagggtgaggcctgatgggtgccggccctgatccctcactcccaccagggccactgctcacctcccagttctgcttggccccaccctgctcagcccagtcttgtggtgtgcgaccccgctggtcatgcagttgcaagtcaccccctgcctgcagcaggggcaccatcactaaagaaggcgcctgcaggcacgggggtgctgccatccaggcagcggttagagcagaacaacgcggtgggagtcgattagggaagggactgaacagggacaaaaaggggcaggatgggggccctgggggatgggaggagtcaccatgtcatgggaggtgaatatgaggatgggaggggtcacatgagggcaggatggggtctttagggaatggaggatcactacgagcatggaggcactgggagaatgggaacagtcactggggaatgagaaggggttaattgagagaataaggagggttactggggggacaggagggtcaccagggaatggaagaggcatctcgagggagagatgcctcaggggaagagagccctagctctcaggctttctggggctcaaacttgggcccctggggatggggggcatcactggctggccagccactggttgggcttggcaccaaaggccagcaggagctgcatggcagagccgtggcccagcagcgccgagaggaagagcgctgtctgcccctcagagttctccccgtccacctggacacctaaggggcaggcaggcttaggacgccccaggcccatactcctgggttggaggcctgagggccgctaggcaaacacccttgccaattcccatcctccacagcccctccatgactggatgactatggaccccaggttccatctctgtgtcctggaacccctgccctccagctgctgaggaccatgcctcgcaatccacctcaacacagtgctccccaaatcattaagtccacagagttgaaacaaggggtgacatctgcctgctgtgcaaacatctatcccccaacccagggggatcaaaatcacacaaaggtccccatgggccaggaggaagtggatttcaggggactttgacttccaggagccttgcgcactggccgggacaggcggactccacccagctgtgactcagtgtggtacacacaggtcccatgaggccagcactcagcaattcaagtaaagcaaactctggattttatcagatctctcaaattttatttattttaatttttaattttttgtagagatggggtctcattatattgcccaggctggtcttggactcctgggctcaagcagttctcctgccttggtttcccaaagtactgagattacaggcatgagccaccatgcatggtctcaattttatttttgaagcctgcatctaagggctcaatccagttggcaaccccctccatgtccttacctccaggcctccgccaatcccctccccaaccatcttcctgctcagctccccctcccaaccactcactcctgccccaagccctgggtctccaaacccgtcattccccagttcctcttcctccagcccctaccccaggtagagcaaatgcatggtatccttgtccttgcactcctgtgtccttggcagacacggctaattattcatgcactgggcccaacccagcgtggtctctgccacaaaacccctccaaatgtggaccttcaggaatctctgaataccagatttgcggcattgcatttgactcattagctcactatcttttacaacagcatcttaactgcctttctgcactcatcctgccccacagaggcctttttttttttttttttgagacagagtctcaatctgttgcccaggctggagtgcaatggcgcaatttcggctcgctgcaacctccgcctcccaggttcaagtgattctcctgcctcagcctcccaagtagctgggattacaggcgtgtgccactatgccaggctaatttttttttattttagtagattaggggttttgccatgttggccaggctggtcttgaactcctgacctcaggtgatctgcccacctcggcctcccaaagtgttgggattacaggcatgagccactgtgcccggcctttttttttttattttaaagacagagtgttgccaggcatggtggctcacgtctgtaatcccagcactttgggaggctgaggtgggcagatcacctgaggttgggagttcaagaccagcctgatcaacatggagaaaccttgtctctactaaaactacaaaaactagccgggtctggtggcacatgcctataatcccagctacttgggaggctgaagcaggagaatcacttgaacccaggaggcggaggttgcggtgagcagagatcatgccactgcactccagcgtgggcaacaagagtgaaactccgtctcaaataaataaataaataaataaaataaaataaagacggagtctcactgtgtcacccaggctggagtacagtggtgcgatcacagctcactgcagccttgacctcctgggctaaagtgatcctcccacctcagcctcctgagcagctaggactacagcacactccacagcacccggcccgaggtctcttcttaaaacacaaatcacttttaaggactagataatcttatatgagttgttccaaagaaaagaaaaatagaaaaagaaggcaaggctcattttatgaggctagcaggaccttaattccaaaactagatgaaagtttccagaaacagaaagtaagattatatatcaattgcatatatatgcaaaaactttaaataaaatagaatagatttatccccataaagcaaggatgattcaacataagaaaatctatcagctgggtgtggtggctcatgcctgtaatcccaacactttgggaggctgaggcaggtggatcacctgaggtcaagagttcgaaaccccttctctactgaaaattcaaaaaactagccaggtgtagtggtatgcgcctgtaatcccagctactcaggaggctgggacaggcgaatcgcttgaatctgggaggtagaggttgcagtgagcagagattgcaccattgcactccagcccgggtaacaagagtgaaactctgtctcaaaacaaaaaaacaattaaaactagtaagcaagttcagaaagtggcctgaaacacaaccaactttacaaaaatcaaaacagaaattgtacattgttaatttaatgggttattgttttgagacagggtctcactctgttgcccaggctggagtgcagtggcctgatcaaggctcagtgcagccttgaccttttgggctcaagcaatcctccctgctcagcctcccaagtagctgggactacaggcatatgatgccaccactccctggtaatttttttaaaatagagatagggtcttgctatgttgcccaggctggtctcaaactcctggactcaagcaatcctcctgtctcggcttcccaaagtgctgggattataggtgtgagccatgtggaacaggttgcccagcctaatttaatgttaattatgttaatttcctgcttacaatgccaacagtttcctatcacacacacaaaatccaacaaaactcacactcctttagaggcccttaactgtgtggacttgtggccacttcagcctcacgtctctccaagtcctgctgctactcatacatgggcagttcattttgacttcagagcgtttgcacagcctcttccatcactccccacttctttttttttttcttttgagacggggtctcgctctgttgcccaggctggagtgcaatggcacaatctcagctcactgcaacctctgtcttccgggttcaaatgattctcctgcctcagcctcccaagtagttgggattacaggcacatgccaccatgcctggctgatttttgtagttttagtagagacgaggtttcaccatgatggctaggctggtctcaaactcctgacctcaagtgatccgcctgcctcggcctcccaaactgctgggattacaggcatgagccattgcaccccaccatctctccccacttcatttcaccttttttgcgtggctgactcttatactgtaagactcaagcatcctccacctgaaaggccatactgtctagggtctcatcctcatcccactgcatttcattcccaatggtccaagggtcatgttcacccttaaagccccatcagggaccacagagctcgggacacagtcggtgttcggtaccactgctgactggccaactgaagccacaccctccatacagctccttgatcctgccgccacagatgtacctgcagccaggccctcacctctccgcaggagcctggccgggccccatcctgggcccccagccacagccaggtggtgcagacggcccacctgggtgtctagatccctcttggagcccagctccactgggaagcgcgaaagggctgcgagggcatctgtgggctgcggctcagtcggctcctgggcagggatccgctaggggggtctcatcagggaagggggatgtgaaggactggaactttgggcacaacaaaacaatgaagacagagctggctgggggtcctgggggcgcagtctagacgggaacgggatttaggaggggtctgatgggaagggaggtggctgaatgagaaaagggggtggctctgggagggcgacacaccagaaggtctggggtcgcagggaggctgagagctgagggggatctaaggcaatcgggagtctgggagggggcttagggctggggtcgggcgtgccagggtggcagaagggctgcgaggataggatccgagcttgggaaaggagtcggagggctcaggaggaggctctgaaggctgcggtgggaggatgaggcgcctgtggtttaggatctgagaggcggtgagaggggtcatggggaggctctagggacagcgtctgtggggtccgtggggtggatggggtctgagggcagcgggcgcgctctgaaggaggagagggcgctgatggcaggatctgccgactgtgcgggggtccgcgggtgggacgcgtggactaaggactagggaagtgtctgtgtgttgggggtgggggctacaggctggggaagggggctctgaggacagtgtctggggctggggaaggggtcagtggaatggggaaagggttcgctaaaggggcgggcaggggtgtggtctgagggccgcggaagagaaggacagggtgggaggggcctgagggctgggggaagggtctgagggtgatctgagggcccagaaagctctgggaaagttctgggcccacaccccagtcctggtggctttgcactcaccgttgggctagatagtggtcgccacctgactgccacatgatccggccggctgtatgagcgggaatccgaggtgcttgagcaccagtggcctcccgcagcgcctgcgcagtagcatccccttccccaacacagccccagccactcagcctgggccccacagccctgaccagtcggggctgtcactgtctgaggacggggctgtctacccacaccggactaagccctgtaaggcagggccttgggtcgttcttgtcactgttgtgttcacagcgttgttcaccccagaacctagctcaaaagaggcctcattcagtgcttttattctcactctgtcgcccaggctggcgtgcagtggcgcgatctcggctcactgcaacctgcatctcccaggttcaagcaattctccttcttcagccttccgagtagctgggattacaggcgcacgccaccatgcccggctcatttttgtatttttagtagacacggggtttcaccatgttggccaggctggtctcaatctcctgacttctgcccgcctcggcctcccaaagtgctgggattacaggcatgagccactgcacctggcgtttttctcagacaggatctcactctgttgcccgggctggtgtgcagtggcaagatcatagctcactccagcctccacctccagggctcaagccaacctcctgcctcagcctcccaagtagctgggactacaagcacaggccacccaccacacctagctaatttttttttttttttttaagatggagtcctgctctgtcgccaggctggagtgcagtggcacgatcttggctcactgcaacctccatctcccaggttcaagtgattctcctgcctcagcctcccaagtagctgggattacaggcgagtgccaccacgcctggctaatttttgtatttttagtaaagacagggtttcaccatgttgggcaggatggtttcgatctcttgacctcgtgatccgccggcctcagcctcccaaagtgctgggattacaggtgtgagccacagcacctggctagctaatttctttctttcttttttttttttttttttttttgagagataatggggtttcactatgttgcccaggctggtctcaaactcctgacctcaagcaatccacctgccttggtctcccaaagtgctgggattacaggcatgagtcactgcacctagtttcattcaatgcttattaactgagagaatggcttggctctttcttctgtccctccctcgccaagtggcctgggccgagccccttgacttcagtgccttggtgtctgctccccatgtgtgcccttcctttaggcatcccctgggatgaagaaagttctgcatcagtcactggccagacccaacccaggatggtctgcctcagaggtgagggaggcttccttagtcctccgtcaatgccctggctatgctcaatgggtgtctaacgatcttttttttttttttcttttctttttttttttttttgagactgagtctcactctgttgcccaggctggagtgcagtggcgtgatctcagctcactgcaagctctgcctcctggattcatgccattctcttgcctcagcctcccgagtagctgggactacaggcgcctgccaccacgcccggctattttttgtatttttagcagagacggggtttcaccatgttagctaggatggtctcgatctcctgacctcgttatccacacgcctcggcctcccaaactgctgggattacaggcgtgagccaccgtgcccggcctctttttcttttcttttctttttttttttttaaacacagtctcttgctgtcacccagactggagagcagtggtgcagtcataggtcactgcagcctcaaacccctgggctcaagtgatcctcctgcctcagcctcccgagctgggaccacaggcacgcaccaccatgccctactgatttaattttttgtagagaaagaatattgctatgttgcccaggctggtcttgaactcctagactgaagcacgcctcccacctcggcctcccaaagcgctgggagtataggcgagagctaccactcccagcctaacgatctctcttgaactgcaaaacccctagcttgggctggctgaggtcaagatgagcccttccccaaggaggcggcgtcagtgcaggacagcagcttaggcagcacctaaggacttttattgaccacatgaccccctcaggggtgctagtggggtatccttcggcatcctggcagcagccgccgccacagttcttggctgagcagctcctgttccctgcgggcaccctgaagcacgctccggttctcctgggccctccggatcaggtaggggattacctcctccaaggagccatagggaatggacttatacactacatagccggcctgccctgcagggagagtgggttttgttttttcgtttttggtgtttttctgagacagagtctcgctctgttgcccaggctggagtgcagtggtgcaatctcagctcactgcaagctctgcctccaggttcaagcgattctcatgcctcagcctccagaatggctgggattataggcgcttgccacgacgcccggctcatttttgtatttttagtagagatggggtttcaccatg[137 bp omitted]tccccagtccccacctggaacagagacttctgtttctgagaacatggcagattaagtgagttggataaaatttctaactgaaaaagctaaaagtcctggagcaaacttttttttttctctcttagacagggtctagccctgtggcccaggctggagtgcagtggtgtgatcacgactcactgctgctttgacctcccaggctcaaacaatcctcccacctcagcctcctgaatagctgggaccacaggcatgcacctccacgcccagctaactgtttttattttatctcaattgattaattaattaattaattaattttgagacagagtcttggtctgtcgccctggctggagggcagtggcacaatctcagcacactgaccaacctggccaacatggtgaaaccccgtctctactaaaaatacaaaaattggctgggcatggtggtgcgtgcctataatcccggctactggggaggcggaggcaggagaatcacttgaacccaggaggcggaggttgaagtgagctgagatcgtgccactgcactcaagtctgggcgacagagccagactctgtctcaaaaacaaaataaataagctgggcgtggtggctcacgcctgtaatcccagcaactctgggaggccaaggcaggcagatcacctgaggtcaggagtttgagaccagcctggcaaacatggtaagaccccatctctactaaaaatacaaaaattagctgggcgtggtggcagccgtctgtaatcccagctacttgggaggctgaggcaggagaatcgcttgaacctgggaggcaaaggttgcagtgagccaagatggcaccactggactcctgcctgggtaacagagcaagactctgtctcaaaataaataaataaataaaataaaataaaagagaaaatgagaacccagagagagaagagacacacagcaagccacttctgccccaaaagcaaaaccgaggtgctatctgatgaattcacagagttgcggggggacattgagtcagtcttcaagcctgaggtgagagttataagggagaacttccccaagttaagctggaacccaaaaatctacacccttagagtaagagttaataaaaagtcaaccctgcaaccttcccccagtcccaggaaatggtcttggccataaacagatcaaggaagaaaacagaaaaatccacctctgcgaagttggggctatgggttaacccccttatgtatttgcagctcaaatttgtgccagtggggtgtttcaagaaacctcaagctatgaatttaggataaagtgatttcgttctgcttagcacctggcagaaggaaacattaattacctggtgtcaggccctgaggagcagcacagtaaagataacaaaacacacaagaaataatacaccatgatcaagaaccagcagaaatgacagacggcagacacagagacacagccttggaaggcccacagacactggaatgacagatctctctggaaggatctggaggctgggccttggttgggaataggagaagggctctggctgggagggagtaaggcctggggcttgatgggggtgggggagccattcacatacccagtgctagagagacgtggtcacacatgcccagaagttgtccgaaacagacagtcccatccagaggaatgcccagctcccacatgctacagaaaaggccacatcatcagtccagactgtggctgcatctacagcttaaagtcagccactatgcacccatatggcggctccagtaattcaaacattgaagtatttccaaactcaatgatacataataaccagtcctttgcattccttgaaggtcccccagtgactcccagccagttccctggagccctcagacctcctcatgccccagcaaataaggggcaacgtcttgtccatctgggacctataaggacttacaggtatagcaggggttaatgtgtttgtttgtttgtttgttttaagaggtagggacttgctttgttacccaggctggagtgcagtggctcaagcactgctcactgcagtctcaacctcttgggctcaagtgatccttccacctccggaatagctgggactacaggtgtgcgccaccacacccagctgtttttttttttttaatttgttgtagaaatggggtcttgctgtgttgcccaggctggtctcaaacaatcctccaccttcgcctcccaaagtgttgggattataggcatgtgccaaccatgcctggctataaatatttttaaaattctccccagaacacctctgtccatctctggcatttgagcaaaggagaggaagggagggcccttttgtgggcacctatttcccgcccatccctccacctcataccgcttggttgcctggcgaacagattcctcattgtgggaagccaccatgaggtggcacatggggccatggcgggccacgtgcgtcagcatcagttccaggcagcggctgtaactgaagggagatgctctgttcagctcacctggtgagcgagggtcaggccccagcgactggggtgggtggggtgctcctaagcaaggggtctctggaaccagtactctgttccatctgcaccagttgtaagggacatcacttctctgagccactttcatcttctggggttttttgggggttttgtttgtttgtttttgagatggagtcactctgttgcccaggctggaatgcagtggcatgatctcagctcactgcaacctccacctcccaggttcaagggattctcctgcctcagcctcccgagcagctgggattacaggcgtgcaccatcacacccggctaatttttgtatttttagtagagacggagtttcgccatgttgcccaggctggactcgaactcctgacctcaggtgatctgcccgcctcagcctcccagagtgctgggattacaggcgtgagccaccgcacccggccccatgttaatctcttgtcactgtgagtttccgagcaacactgttgtgaggatggagtgagataagggggatatgaagtctttgggacagtggcggcggtctcacaggagagggtcgcatcacatgcacaagatgacatttccccaaggttatcactgctgcattgtcaacagaacatcactagcaacagcccaaatgtccataaatggggaactggctaaggaaattgtggtacagagaagatagtgctctatcgcgcaactgtgaaaaggaaggaagacactgtctgggtactgatatggaagaggaaatagattggcaaacaccttgcaagcatgctgcaggccacgggccacgctatgtatttcacatcctctgtgggtcttccctatcgccccccagacctgttttctacccttctctgcccctcaggaagctgacacttttgccccacatcccccatggagtcatgtgcaggaaggagtgtgggtgtctcacctcggcccctccctgctcaccctgactgtgttctgtgtgtggccacagctccctaaggtggcccctctccttcaactacagcataggggtcaaaatagcttcctaatagcttccctgactttgcccacacttccttttcgttttgtgttttttagagactgggtctcactctgttgcccaggttggagtgcagtggcgtgatctcggctcacggaatcctccaactcctgggctcaagcgatcctcccaccttgggctcccaaagtgctgggattacaggtgtgaggccctgcacctggcccctgacacttctataaacagcctcttcaccacatttcctttagttaaaaccctttgtgcagaattctgtttgctttggagaaagctaatcactcatctaattcccacatcaactctgggaggcagatgttcttattccattttaacagagtggggagactgaagctgagaggggttctatctcttgtccccaggtcacacagctagaggtggccaggctgggatttgaactcaggctgtctgatgctccagagcccaggctccttatcggtaggctagtctgcctttaaaatgcacagttgtggctggacatgctggcttacgcctataatcccagcacttggggaggccaaggcaggagggctgcttcagcctaggagttcaagactagcctgggcaacatagggagaccccgtgtctacaaaaataaaaaaatgtgttgggtatggtggtgtgcgctggtggtcttagctactggggagactgaggtgggaggatggcttgggcctggggagtcaaggctgcagtgagccaagatcgcaccactgcactccagcctgggcgacagagtgagaccctgtctcaaaaataacttaaaaaacaaatgaaaaaagccaaatatacaagggcacatattgtatgattccatttataagattgtctagaataggcaaatccacagagacaaaaagtaggttagtggtttccaggggctgaggggaggagggaacagaaggcagctgactgctcattggtatgaggttactttttggggtgatgaaaatattgtggaatcaaagagtggtgatggttgcacaattttgggaatatactaaactccactgaattgtacatgttaaaattgtgaattctatgatacgtgaattatatttcaatatttaaaataatagtgcaaattattattattattttgagatggagtctcactctgtcgcccaggctggagtgtagtggctcaatcttggctcactacaacctttgcctcctgggttcaagtgattctccttcctcagcctcccaagtagctgggattaccagtgcaagccaccacacccggctaatttttgtatttttagtagagacagggtttcaccatgtttgtcaggctggtctcaaactcctgacctcaggtgatctgcctgcctcagcctcccaaagtgccgggattacaagcgtgagccaccatgcccggccataattttttgtgtttaatgttttttacagatggggtcttgctatgttgtgcagattgggctcaaacccctgggctcaagcaatcttcctgcctcagcctcccaagtagttgggatgacaggtgcacaccactgtgcctggcttggtgccagttaagctgatggtacacaaacgtgccctggagcccctgcagatcttggacatgagcctggattccaagcgtggctaggccacctgctctgtagcctggctgagtccctgtggcccccagagaaggtaccaagaagtaaagatctaaggaggtgagggatggggccatgccactgtctgcagtgggaatgtcccaggcagtggaaacaggatgtgccaagcccctgggtaacatggaggaggccagtgtggctgtagtggagtgagggagaggaagagagggagggaaagttagggaagtgacagggagcatgtggggcttagaggccactgtaaggatttctttttgttttgttttgtttgtttgtttgtttgtttgtttgttttgagacagattctcgctctgctgcccaggctgaagtgcagtggtgcagtcatggctcactgcagccttgaactcctggcctcaagtgatcctcccacctcagcctcctaagtggctggaaccacaggcatgtgctaccacacctgactatttttaaaattttttagagatggggtctccctgtgttgcccaggctggtctccaactcctgctctcaagtgaatctctagcctcagcctcccaaagcactgggattacaggtatgagccactgcacccaaccactaggtgttattatttcctgcagaggccagctggcccgggcctacctctgactggtggcctcatagtcaggctgagtggggtcttccatcccatggagctgggccaccgctctctccttgtccagatatgcacctcgtaccagcttcactccgaaggccaggccggccctgtgcgcagcctctgcatccctccccagccgctcgaatgtgtcctatagggcacgcaggcaggttctggtaggtcagggtgtggggaccccagcctgtacctcctggaacacactgcacacctttagacaggcctggtaggtgttccacacccagggcccgccttcacccgggctgttccagcgcacagccagggcagccaccagcagcgagagcgcagggttcagtgaggtgtactccgcatccaccaggagccgcacgtgctgggcccgggcatactgatggcgacagagacgacggtcagggccccgggtgtccagcaggggcagtggagccagatcccagcaggaggggttacctgtgccacccgatgcaggcggctgagggaggcccggaggtgctggttccagcaggaggggttacctgtgccacccaatgcaggcggcagagggaggcccggaggtgctggttccagcaggaggggttacctgtgccacccgatgcaggcggctgagggaggcccggaggtgctggttctgctcagcattgaggcaggagacctggaggttctagggggcagcaggggaagtggggaaaagcttataagttgctagaaatctaaaaatgagcaatatcagttaggtactatttattgagggggttatgagcctagaatcagggctcgaatccaggcttcaccacctactgtgtgaccttgggcaagttatgtaacctttctgggcctcagtttttgtttgtttgttttttgaaacagagtcttgctctgttgcccaggctggagtgcagtggcatgatctcagctcactgcaacctctgcctcctgggttcaagtgattctcctgcttcagcctcccgagtagctgggattacaggcgcccgccaccatgcccggctaatatttgtacttttagtagagacagggtttaaccatgttggccaggctggtctcgaactcctgacctcaagtgatctgcccacatcggcctcccaaagtgctgggattacaggtgtgagccaccgtgctcagccctccctgctactctttgaacacgagggcaccttcccacctccagccctttacctgctcccatgtttccttcaagtatttgctctaatgtcactttctcaacatggttttcccacctatacattggcaacttcttttcctcttcctcagccttattttcccttacttgttacgtactgacttttgttttgctgagacggggtcttgctgtgttgcccaggctggaatgcagtggcacgatcatggctcactgcagcctccacctccccagctcaagcaatcctcctgcttcagccttccaagtacctagtaccacaggcacccaccaccatgccgggctaattctttactatttgtagagtcaaggtcttcctatgttgcccaggctggtctcagtctcctggactcaagcgatcctcccacctcagccttccaaagtgctgggattctgactttggttttaattattgtctcttgcccctgacttgcaagtaagtgcctcgaggtcagggattttgccttcatgcttcctcggcccctagcaccgtgtctggaacaagatagatgttcagcaaacacttcgggagtggatatgcttgtaacatggaaataagaaccgtttctaactcacagtcttatgcagattcatctggctgaatgtgagctgctggtgactccagggagtctggctgggttcaaagaagttgggaaatggaagaaagaggaacaggtggggctgaaagctttattatatccaacagggtcgatacagatgacataggcctgggcttgctcatggaatcccacctggaggcaggttgggctggaagctgcaaccttccgcatggtggggagaatgctgcctcctggagaagggaagacctggaggcagcagcctggtttcctcctcccctgtcagaggattgtctcctgcttgacttggggcgtagtcttaggccctcagggagctatttcagacacccaccaaatatttaactcatttaatatttaccactctctaatgtaccaactgttattatccccccattttctagatggggaaactgaggcacagagcagggaagtcacttgtcaaaagtcacacagctaactcagggcagacctgaggtttaaacctcagcctttccagagcctgggtctttctctcttttctccctccctccctccttccctcccttccttccttccttcttttttttttttttttgagatagatctcactctgtctcccaggcaagagtgcagtggtgcaagttcaagtgattcccctgcctcagcctcctgattaactggggctacaggcacgtgccaccacttctggataagttttatatttttagtagagatggggtttcaccatgttgcccaggctggtctcaaactcctgacctcaagtgatccagccccacttagcctcccaaagtgctgggattacaggtgtgagctacagcacctggcccttttttctttctttctttatttctttcttccttccttccttccttcctttccttccttccttccttcctccctccctctctttctttcttcgctctcaaacttgccagctcaagcaatcctcccaccttagcctcccaagtagccaggattacaggtgcctgccaccacacccagctaatttaaaggaattttttgtagagatgagggtttactatattactcaggttggtattgacctcctgggctcaagcgaccctcctgccttagcctccacaccaggtgtgcaccagcacacaggctgattttttaatttttttgtagagatgagatctcactatgttgcccaggcaggtctcaaactcctgggctcaagtgagcctccaatttcagcctcccaaaatgcagattacaggcatgaggcactgcacccagcctgttttaatccttaaaaccactgagaagttgctgtcactctccctacaggaataaactaaagctcatgaagaggtgaactccttactctccaaagctgattttctgaaccatgaaatcttgtttctatgtgttctctgacacactttaaaaattacaaataaggccaggtacagtggctcatgcctgtaatcccagcactttgggaggccgaggcacgtggatcacgaggtcaggagttaaagactagcctggccaacatagtgaaaccccatctctactaaaaatacaaaacttagctgggtgtggtggtgtgcgcctgtagccccagctactcaggaggctggggcaggagaatcgtttgaacccgggaggcggaggttgcagtgagccgagatcgcaccactgcactccagcctgggcaacagagc[141 bp omitted]gtgaagcctcatccctactaaaaatacaaaaattagccaggtgtaatggcaggcgcttgtaatcccagctactcgggaggctgaagcaggagaacccgggaggcggaggtcgcagtgagcagagattgcgccactgcactccagcctgggcaacagagcaagactctgtcttaaaataataataataataataataataataataaataaatagataaacaaataaaaattacaaataaaaaaaggttagaaaaagaaacatcagcatgtccactatagcattgtttgggagggtggagacacagaggccacccaggggttcaccccaggagaggtaaaccatgcagcagctagaatcaactattggaaacagtgggggccgggcatggtggctcagcccataatcccaacaatttgggagggtgaggcaagaagaatttttttttttttttttgagacggagtcttactctgtcaccaggctggagtgcagtggcacgatctcggtttactgcaacctccgcctcccggttcaagcgattctcctgcctcagcctcccaagtaactgggactacaggtgtgtgccaccacgtccagataatttttgtatttctagtagagacggagttttac[140 bp omitted]tgtgtattggttaaggttcatcaaagggcacatttacaatgtgtgtagttcattgttttaccttgaaagaaaaaaagtactgcgaataattattgggctctaattaatgagcccattattcatatcctgaagcatttagggggaaaacatgtctgcaatttactttgaaatgcaccaaaaaataagatggattgatggatggatagaggaatagagggatagatatgatttaaagtgagtatagttaaaggtggcgggggcatggatgttcatgtacaattctttttacttttctgtatatttgaaaatttttataatagaatattggggaaaatatgccccccacgaatggtatacacctggcaaaacaaaatcatagaaacaaaaagatatgcattatacaagacggcaggctgggtgtggtggctcacacctataatcccagaactttggggggctgaggctgggggattgcttgaggccatgagttagagaccaccctgtgcaatacagtaagacaaagagaaagagagagagagagagagaggagggaggagagagaaggaaggaaggaaggaataaaggaaggaaggaaggaagggagggagggagggaggggagagaaggaaaaagaaaagaaggaaggaaggagagagagcaaaagaggaagaggaaggaaggagagagagagaaagaaagaaaaaaagatggagtagggttgaaagagaatgtggagataaaaaggaattaatgattgaatgaacaaactaagaccccattggcctaatcagaacttacacccagccagctcacacccatgcagctgtgttgactgagaacacactgatgtacctccttctaattgataaacagcttctatcccaatccctcctctgagagcctccagcctccaggctcctccctgagaacccagatgaccctgattccatccatttcaaccatgcctgggagctacagctgcacttctgctggctgttccaagcctggaggtggccgtagcattttgaacatctggcgtgcggtgtggccgcatctaagtccaaggcactctgtccccgacagtcccgcttgagatccttacctgcccagagtccatagcttcagccagcctctcggggctcagctccaaggaggctcctggccttctgacccacgaggctagctccttctgaaatggggtggtaggcggggtggtgaggggagcccgatgggcagccgcgccctccccgcacccccgtctttgcactccttacacagagccgagtactggtcagcgccgtcaccttcagctgcatgaggctggcctcagccaggctggggggctccaggaggccccgtgacaggtccacacaccgcagcatagcaccgaggttcccctcataccacgcctcactgcccagccagcaggtgtcagggcccgaacagcaaagccccttcctgcgtcctcccagcctccctgggccctggctccctactcacccactcttggcagcagagtccggctcctcctcagtgggcactgccagcagtggtcggaggctgagggtccgcagctgctgcacgcagcccttcacctcctctgctgtctcaccagccacaaactgcccatagacggatgctcggagaaatgcgcctgagagccgggagcccaggagtcgccgagaccaggcctggagctgggtgacagggagcgagggctcagcgccaggctatgaggagcctccaggctggtcctcaggatcactgctcaccaacagcccgtgagtgacgagtgggggccaggcacacagccggagaaccagcaaggcccgtgtcagctctcctgtgcccttaaggtggaaggccccgccatcaaagctcagggactgccagcccctggaggggggaccagcttgggaacagagcacgtaacaggtccggagcatcctgggtccctggctgcctccacaccagggaaggttctctggaggcagcaagttcaccaactgccccttgcccagaccaggggcagtgactgattaactgggcaaagcctcaggatcacaggctccttgggggcaattaattattaacaaatggggacagagttcagagtaacggaaacgggaggtgaaccccagtaacagcccccaagaatgctcagcacaacagcctgcacttattaggtaaccaccatgtgctggggaaagcaggggctccggagcaaggatccctgggctcaggacaccgggctttgtgatccaggacaggctacttaatcacttttgtggcaattgcttcctcttaaaattggaaacgctgtagtgttattgaatacatttgaaaatacggttctcacgtttgtaatcccaacactttgggaggccaagaccgaggagtttgagactaccctgggcgacatagtgagaccccatctctacaaaaaatacaaaaattaactgtgtgtggtggcacacacctgtggtcctagctactcaggaggccgaggaaggtggatctcttgagcctgggaggtcaagggtgcagtgagctgtgattgtgccactgcactccaccctgggtgacaaagtgagactctgtcgccaaaaaaagaaaaaagaaaagacaaataacctatataacccagctgttccatgctaagtacatatcctagagaccttaaacatggacagcaggaaacatgtacaggaaagaatgttcagaggagcagtgtctgaactacccaaatgtccatcaaaaggagaatggatacatatatggtggtgtagttatgcaatggaatactatacagtaatgaaaaagaatggatactgatacacacaactgtgtggctgaatctcacaatgtcaagtgaaagaagccagacaccaaacagggcaagctgtattattcttttttttttttttttttttttttttttgagacacagtttcactcttgttgcccaggctagagtgcaatggcacaatctcagctcactgcaaccttcaccccccgggttcaagcgattctcttgcctcagcttccagagtagctgggattacaggcatgtgccaccacgccccactaattttgtatttttagtagagacagggtttctccatgttggtcagactggtcttgaactcccgacctcaggtgatctgcccgcctcagccttccaaagtgctgggattacaggcatgagccactgtggctggtctatacttttcaataaatataaaagcaaggaaagtgaaactgcagtaaaatgttgggaatacatgcgtgggtggtcaaactatgaggacaagaaaagtaaggacatgattatcacagaagtcagagaggtggttgattgtgggggatgggaggaattgtaatggggtagagggatatggggacttctatatcctattttctttttttaaaatggaaaccatatgtcttaatttttttgttttgttttgttagacgtatccttgctctgtcacccaggctggagtgcagtggtgcgatctcggctcactgcaacccccatctcccgggttcaagtgattcttctgctttagccccctgagtagctgggactacaggcacccaccaccacacctggctaatttttgtatttttgtagatatggggtttcaccatgttggccaggctggtcttgagctcctgacctcaagtgatccaccctacttgtcctcccaacatgctgggattacaggcgtgaagtcctaggtctttttttttttttttttttttttttgagacagagtcttactctgttgcccaggctggagtgcagtggcacgatctcggctcactacagcctctgcccccgggttcaagcaattatcctgcctcagcctcccgagtagctaggattacaggcgtctgccaccgcgcctggctaacttttgtgtttttagtagagtcacggtttcaccatcttggccaggctggtcttgaactcctgacctcatgatccacctgccttggcctcccaaagtgctgggattacaggtgtgagccactgtgcctggcagtggcttctaggtcctaggagtcctaggtcttaacatggatgatgattcatagttgttcacattgtaaggttttttttgttttgtttttgagacagagtcttgctctgtcttccaggctggagtgcagtggggtgatcactgctcactgcagcctcaaacttctgggctcaagcaatccccccacccaccacctccacctcccaagtagctgggattacaggtgcatgtgatcacaccgagggtaatttttaattgtttttttggtagagacagagtcttactatgctgcctaggctggtcttgaacccctggactcaagcagtcctctcaccttgggcctcccaaagtgttgggatttcaggcatgagccacggcacctggccctcacattgtaagttttttttttttgagacggagtcttgctctgtcccccaggctggagtgcagtggcgcaatcttggctcactgcaagctccgcctcctgagttcatgccattctcctgcctcagcctcccgagtagctgggactacaggcacccaccaccacgcccggctaattttttgtatttttagtagagacggggttttaccatgttagccaggatggtctcaatctcctgacctcgtgatccacccgcctcggcttcccaaactgctgggattacaggcgtgagccacactgcgcccggccttgaaatttttatttattttcttatttatgtatgtatgtatgtatgtatgtgtgtatttatttatttattcatttttgagacagggtctcactctgttgcccaggctggagtgcagtggcacaatttcggctcactgcagcctcaacctcccaggctcaggtgatcctcccacctctgcctcccaagtagctgggactataggcacatgccactatgcccagctaaatttaaaaaaatttttttttcctttcttttttgtgatgggggatctcactctgtcacccaggctggaatgctccagcatgatcatggctcactacagcctcaaactcctaggctcaaacaatcctcctaccttggcctcccaaacgctaagcttataggcatgagcctctgtacttggcctgccttttttttcttttctttttttttttggctccatcttgctctgttgcctaggctgcagatgtctgctcactgcaacctccgcctcccaggttcaagtgattctcctgcctcagcctcccaagtagctgggattacaggtgtctgctaccatgcccggctaatttttgtacttttaggagaggcggggtttcaccatattaaccaggctggtcttgaactcctggcctcagatgatccgcctaccttggcctcccaacgtgctgggattacagacgtgagccaccacgcccagcctagggcctcatccccagaaatgtgattactgggtaggcattggggtgttgaaagctcccctggtggttcaaatgttcacccaggtgaagaggcacggcccctacaatcggacaccttagcctctctaaatggggtcctccctccctctttgtcttttcactgtccctggaacacacccagcttcctgctgttgcatttccgctgttccttttccctgaaaactccacccttccttctttccctaattaactcccacctgccctcaggtgtcagggtttaagacaccccctcaaggaggtctgccttgagcagcccctcccagatgagggggagttttaccctttcacattttaacaccagccttgtagctcttgtcatgtttattcgtctgtgagtgaagactcagtttctctccccacgcccctgctagactgtgaacaccatgaggtcggggggtcacatttggttttgtcattaatttatccctactgcttaacacaggacttatttttgttgaatggacttatttttgttgaatgggtaactaatttaatagatttctttggtatttgctggacaagggacttatagattgcatcacatcaattcaagcagattctggataagacccacctttttttttttttttttttttgagacagggtctcactctgtcgcccaggctggagtgcacaatgtcggctcactgaaacctccacctcccgcattcaagcatgctcctgcctcaggctcccgagtagctgtgattacagttgcaggccatgaggcacacgccaccatgcccggctaatttgtgtgtgtgtgtgtgttttttttttttttaagtagagacaggtatttcacattgttggccaggttggtctcaaactcctgaccttgtgatccgcccgcctcggcctcccaaagttctgggattacaggtgtgagccaccgcgcccggcctcgaagtttttttgtttttttttttttaatgagacatagtcttgctctgtcaccagctggaatgcacggcgcgatctcggctcactgcaacctctgcctcctgggttcaagcgattctccacctctgcctcccaagtagctgggactacaggcgcacaccgccacgcccagctaattttttgtattcttttagtagagatggggtttcaccatgttggccaggctggtctcgaactcctgagctcaggcaatccgcctgcctcgacctcccaaacatggccttgggaatcgccatgtttgggtggacccagttgggtggcctgcatttgcatattaaa[134 bp omitted]gtgaaactccgcctctactaaaaatacaaaaattagccgggcgtgatggcgcgtgcctgtaatcccaactactcaggaggctgaggcaggataatcgcttgaaccggggaggtggaagttacagtgagccgagatggcgctattgcactccagcctgggcaacagagtgagactccgtctcaagaaaaaaaaaaaaaaaaaaaggtagaaattagagagtatagaagagaggcaatcttggaagaaataatggctgagaattttccagaactgatgaaaaatacatattcacaaagaagcaaagatatcttaagctagataaaacaaaagaggccgggtgtggtggctcgtacctgtaatcccaacactttgggaggctgaggcgggcagatcacgaggtcaggagttcgagaccagcccggccaaatggtgaaaacctgcctctactaaaaatacaaaaattagttgggcgtggtggcacgtgctggtaatcccagctactcgggaggctgaggcagaagaatccctcgaacctgggaggcagaggttgcagtgagctgagatcgcccattgcactccagccttggtgacagagtgagactccatctcaaaacaaacaaacaagcaaacaaacaaacaaacactaaagaaatccatgcctaaacacatcatactgaaatggcagagcattgaagctaccgaggtctattatttatctttgcatcctccagagtgtagcctggactagatgctccaccaattcaattacatcaagagggtgggtatcccaggttgagaccacagacaaattaaaggcaaggaggtagaaacaaatatggctataagaaggaaaagcatttttctcacctatctgaggcacacaacctggattgggggaaagtgaagttgaaaatgagagtgtgggagagggagagactaggtggagagaatttttgtttcgttttgttttagagacagggtcctgttctgtcacccaggctgtagtacagtggtgtgatcgatcatagctctcatagctcactgcagctttgaactactgggctcaagggatcctcctgcctcagtctcccgagttgctgggactacaggagtgtggcaccacagctgggtaatttttgtgttttttgtagagatggggtctctctgtgctgcctgggctggtctggaactcctggtctcaggtggtcctcctgtctcagcctcccaaagtgcttggattacagacatgagccacccacacctggtcactggggaatcctgagtgccctgcaaaacagaacacaatgggctgctcaacagtagccatggaaggttctggaataaagttcccagccggtccttctgtgggtgattgtccattttgtggtaagaggcaaaggggctctaacaccagcagagaggcagagccataggtgggagagtccctcttattctctctggttgggtcaccaggtgaccccataccaatcactgggattgaagaataaggtattccagccagctccagtgctgtgcctgtttctggagcttcaagagtgctcaaccaatgcacaaaacctacctggggcgtggtggctcatgcctgcagtaccagcactttgggaggccgtggcgggtggatcacctgaggtcaggagtttgagaccagcctggccaacatggcgaaacctcttctctactaaaaatacaaaaactagctgggggtggtggcaggcgcctgtaatcccagctaccgggaggctgaggcataagaatcgcttgaacccgggaggtggaggttgcagtgagccaagatcgcataactgcactccagcagcaacacaggtgcactctctctctaaataaacaaataattaaaaacaaaatgaaacaaaaaactggactcatgcgtgactctgatggttccaggaggtgatacatatacagaacatagaatgtgagctggcatgtgttaggagctcataaatgctgtctgtcactgctgctgcagcgactcattggcttcctgtcacccacaggataaagcacaaacccataagatgagctttgtggtttatctttggccatctcactagccttaattcctaccactccctgacttgggggttattctccagcaacaattttagggaaatcccttcccacactgtgctcctggagtcttctttgtctccagcccctgcacagctacttatcccttaatactggagtttggtgacagcttaggagcagaggacagtccagccagttttaatctccagcacagacctctctcctgagctctggaacccaatgtacacacacacacacacacacacacacacacacacacacacacacacacacacatgctcattcagaatcccctcatggattggttcttctcaaacgggacacgaccgcaccctggtgggagcttgggaaatttgcataattgtttttggctgcagcattgattggagggcattacaggcatctagaggcaggaccaggaatgctggacgctgaaatctgcatccagaacagtttgtaaatgtctttgcaggcgcttctgtgcgtaaaataagtttacagttatctgaaattattaatataacacatataccatacacacaaaattttggtatggtttaaaatatattgacattttctgaaatgaaactatgatgtaaatttatttttatttatctattttttttggagacagaatctcgctctgttgctcaggctggagtgcagtggtgccatctcaactcactagaacctctgcctcccgggttccagtgattcttctgcctcagcctcccaagtagctgggtttacaggcctgtgccaccacgcccagctaattttttgtatttttaatagagagggagtttcaccatgttggccaggctggtctcaaattcctgacctcaagtgatcctcctgccttggcctcccaaagtactgggattacaggcgtgagccactgtgcccggcttctgatgtaaagaaagtgaaaattgtgtacttttttgttcagaatggcaccaatggttatacatcatatcagaagaatcacaattccaacaatgccacctatgagatgtaatgtaaaattctgaatgaagtatagcacacataaagaaatgtgcccatatcatgtgttcagtatgaattttcaggaagtgaccagaaagtaaatttgacgcaagtgacacttgaataactaacacccaagtcaagaaaacaacttcgtaatcccagcacttcgggaggccaaggcaggaggatcgcttgggcccaacctggacaacatagtgaaactctgtctctacaaagataaaaaattagccatgtgtggtggtgcacacttgtagtcccagctacacaggaggctgaggtgggaggatcgcttgagcccaagagttggaggctgcagtgagccatcatcacaccactgcactccagcctgggagacagagcaagacaccatatcaaaaaaaaaaaaaaaaaaaaaaagaaagaaagaaaagaaaacaacattatgaggattctcaccccaagccttcctggtgccagtttcaatcaccatccccctctctcccaaaggtaaccagactctttgtttgtttgttgagacagggtctggctctgttgcccaagctggagtgcagtggtgtgatgatggctcactgcagccttgaattcctgggctcaagcaatcctcccacctcagcctcctgagtacttgaggctaccgttgcacaccaccatgtccagctaatttttgtattattttgtagaaacagggtttcaccattttacccaggctggtctcaaactcctggtctcaagcaatctacacatcttggcctcccaaagtgctgggattacaggcatgagccccggctcaggttatgcacttttatagtcagtagtattagtaacatgtggttgtatccttctcagtaatttttttttttttttgagacagagtctcgctccgtcgcccaggctggagtgcagtggcacggtgtcggctcactgcagcctccgcctcctgggttcaagcctcctgagtagctgggattacaggcacgtgccaccactctcagctaatttttatatttttagtagacacagggtttcacatgttggtcaggctggtcttgaactcctgacctgaggtgatctgctcacctctgcctcccaaggtgctgggattacaggtatgagccaccacgcctggccccttctcagtattttatatcagggggctccttgtgtcagtttgtcccatgactggtagcatcaactttgatcatctggtgaaggtgacatctgtcaggtttatccactgtgaaattactatttttccccaagtaactaatgcaatacatgctttttaggctctactaatttgagtttccaccccttgcaaattatttatttcctcctcagttaactaaagacctcattcaaactggtttaagagtgaaggacatttaggccgggcgcggtggctcacgcctggtaatcccagcactttgggaggccaaggagggcggatcacaaggtcaggagatcgagaccatcctggccaacacggtgaaaccccgtctctactaaaaatacaaaaaattagccgggcgaggtgacaggtgcctgtagtcccagctacgtgggaggctgaggcaggagaatggcatgaaccctggggcgcggagcctgcagtgagccgagatcgcgccactgcactccagcctgagtgacagcgagactccgtctcaaaaaaaaaaaaaaaaaaaaaagagtgaaggacatttatggttgcaactaactgaaaatgacattcagactgacctaagtggggagggaaactggtagtctagaagtagccctgacttcaggtgtggctggatccagtggcttggtacaactaggcatttgtcttgttcatcaatatctgtatagattaagggggactagatccggggaaggcagaagcaatagatgtccgctacactgaatcagaaaaaggagaggaggaagtaggaactgcatgaagagacccagccacagcctgcggttactttggagagcttcttccaagtggttcatggtgctgagcaacccaggacctggcttagcagcatattccttggccacagtggttggttccaggacaggcataagacccagcctgggctgatgaaagacagccccagagctttccagaactattggcataaagaggcactctggctgctgagctcatgggataccagcctagaactacaagtggtcttctctgtttcccaaataaagggtctacccgagaatgaagctagaccttgcatggctatgtttcaatactaggtctggcagtgtctgaagccaacgctaccccctgcaattgtcagctgcaagagccaacaaatttcct[131 bp omitted]ggccaacatggcaaaaccccatctctactaaaaatacaaaaattaattgggcgtggtggcgcacacctgtaatcccagctatgcgggaggctgaggcaagagaatctcttgaaccaggaggcagaggatgcagtgagccgaaataacgccactgcactccaacctggactacagagtgagactctgtctcaaaaaaataaaataaaaaagaataaaaatacaaaaattatctgggtgtggtggcatacacctgtagtcccatctacttgggaggctgaggttcaaaaattgcttgaacccaggaggcaggggttgcagtgagccaagatcgtgccactgaactccagcctaggtgacagagataaactgtgtctcaaaaaaaaaaaaaaaaaaaaaaaggctgggcacagtggctcacacctgtaatcccagcactttgggaggccgaggcgggcggatcacaaggtcaggagttcgagaccagcctgaccaacatggtgaaaccccgtctctactaaaaatacaaaaagttagctaggcgtggtggtgggcgcctgtagtcccagctactcgggaggctggggcaggagaatcacttgaaacaaggaggcagaggatgcaataagccgagatcgtgccactgtattcgcagcctgggtgacaaagtgagactctgtctcaaaaaaataaaaataggccaggcgcagtggctcatgcctgtaatcccagcactttgggaggccgaggcgggcggaccacttgaggtcaggagttcgaaaccagcctggccaacatggtgaaaccccgtctctactaaaatatacaaaaattagccaggcgtgatggcaggcgacttaatcccagctacttgggaggcagaggcaagagaaccgtttcaacctgggaggcagacgttgcagtgagcagagttcgagccattgcactcaaacctgggggataagagcaagacttctctcaaaataataataataataataataataataataataataaaaaataaaaacaaaaataaaaaataaaaattaaaaaagaatgttgtaggttttttctttgaaaaggaaaaatatacaattacatgttgttggctgtggatttatttgaaacaaaaagaaaaaatatacaattagaaaaattctactgttagaaatgaagtcaccttttaattacagggaaatcatttagatcttaatgtgtttatgtattccagtgctgtggtgtaaaaacttattttagtctgtgctgataaaaaataacattgtcatacaacaattggggtgtatttgtaaaaaagaaaacaaaagaaaaataaatatattgacaaacacgtgaactagaaagttttgataatatggttaatcaagtagaagtgtggtctgaagaaagtctgttcttcatggaaacaggtgggcttctcagctatcctgctattcaatagaaagatggagccaggcgtggtggctcacgcacacctgtaatctcagcactttgggaggctgaggcgggtggatcacttgaggccaggagtttgagaccagcctggctaacatggttgaaaccccatctctactaaaaatacaaaaaattagccgagcctggtggcggccgcctgcaatcccagctactagggaggctgaggcaagagaattacttgaacctgggaggtggaggttgcagtgagctgagatcgtgccattgcactcctgggtgacaaagcgagacaagaaaggaagggaagagaagggaacgggaggggaggggaggggaggtaaggggaggggagggaaggggaggggaggggagggaaggggaggggaggggagaggagggaaggggaggggaggggagagaagggaagggcagcggaggggagagaagggaagggaagggcaggggaggggaggggagggaaggggaaagagagagagagagacagagacagagagagagagaaagacaggaaagaaaagaaggaaggaagggagggagggagggagggatcctcttactgggctgttattatgaagcctgtttttaaaatcacttttattgagatatcatttatgtacaataaaaatgcacccatcttaagtgtaaagttcaatgagttttgacaaatctgtgcacccgtgcaaccaccaccacaatcgttatatagaatatttccaacacctcagaaagttctcccatgcctttttgcagtcaaccctcctctcatggccccaggaaacctctgctgtgctctctgccaccgtagattagttttgcctattttagaatttctataaacgaaagcacacacacagtacatattcttttcctctagcttcttttgattgtctgtttattttaatgcttatggagcatacttatgtttacatgtgtcatagtttatgcctcctgtgttagataactgtcggaaataataaaataataggtaggatgcaacatggattcataaattccacttattattagctatttcagacgtcatggaatgcaaaatgaacagagtttttcatatgtctttccccacttctgaaaactttacttcatgaagcacttagggaccctcagaatagcattttattttttatttttattttatttttattttttgagacagaatctcgctctgtcgcccaggctggagtgcagtggcgtgatctcagctcactgcaacctccgcctcctgggttcaagcaattctcatgcatcagcctcccaagtagctgggactacaggcatgcgccactactcctggctaattttttatatttttagtagaaatggagttttaccatgttggccaggctggtctcgaactcctgacctcaggtgatccacccgcctcagcctcccaaagtgctgggattataggcgtgagtcaccgcacccggcagcatttcatttttgagacgacgtttacaatctgccctgtccttttggagaagtttagtttctaaagccaaccccaggatgcaccttgtttctactctggtaccagctgaaccatctctgtcactcagccccctccatgtcctctcctgacaccaagtccctttgggttttatggagctcacctaaccagctcggcccaggctgtaatgagagagaccagtggagtgtaaattcctgcaggtgcaggacaatggggttgagagggctcttacaccagatgtcccctcagctcgaagggcagagaatcgggttccagagtgtccaagtctccggccacctggtcatagattcctcttggatcctgatatgtgtcttcaggccagtggaggtcccagggtccctgacaggcaaaaagtggagttagaaccatggagagatgccctgtaggtcttcattgaagatctgggggatacatgcccctgcttaacttcccagaaaaaagtgttttagcttttactaaaatcccaacatatacaaaaaaggagtgtgattataatgaatgcttatgatgaaccccatgtgcttatcacctaacttcaacaatatcaggctgggcacggtagctcatgcctataattccagcactttgggatgccaaagcaggaggattgcttgagaccaggagttcgagaccagcctgggcaacatagtgagatcctgtatctacaaaaaataattttatttttcttagacagggtctggctctgtcacccaggctggagtgcaatggcacgatcttagctccctgcaacctccaccttctgggctcaatccatcctcccacttcagcctcccaagtagctgggactacaggcatgcatcaccacacccagctaacttttgaattttttttttttttaaagacgagg[131 bp omitted]taaagaaattagctaggtgtggtggtgagcgcctatagtcctagatactcaggaggctgaggtaagaggatcgcttgagccccggaggtcaaggctgcagtaagccatgatcatgccactgcactcccgcctgggtgacagactgagactatctcaaaaaaagaaaaaaagaaaaaagaaaaaaccagtagcaacccttggtcaattgatttctctgtatttctatcttgttcccctccccgactaactggattattttgaagcaagcccaagatacccaatgatttcatgttagaaaaataatgtaaatgtcagaaatataaaacctttaggccaagcatggtgactcatgcctgtaatcctagcattttgggaggccaaggcaggtggatcacttgagatcaggattcgagaccagcctgggcaatgggcaaaaccctgtctctactaaaaatacaaaaattagccgggcatgatggtgcatgcctgtaatcccagctacttgggaggctgaggcaggagaatcgcttgaacctgggaggtggaggttgcagtgagctgagattgtgctactgcactccagcctgggttacagagcaagcctccatctcaaaaataaataaataaataaaatttttaaaaatgaaaactttaaaagtccatgttatcaggtatggcaactgtggaatgtaagttatgattatattgtcctatgaatttccaaaacagttccctaatcataatagaaaaacaaaacaaagcaaaaccaaacaaacaacaacaacaaaaagaacatgaatggtagccctaactggggatgtattttgttctagggctgggagaaaatgattattttagttcagcaaactttagagcagattggcccatgctccaaatatggcctgccacctgcttttttatactgcccaagagctaagaatggtttttatttttttctttttctttttctttttttttgagacggagtcttggtttgttgcccaggctggagtgcagtggcgcaatcttggctcactgcaacctccgcctcccgggtttaagcgattctcctgcctagcctcccgagtaggtgggactacaggcgccagccaccacacccggctaactttttgtatttttagtagagacggggtttcaccatgttggtcaggctggtctcaaacttctgaccttgtgatccgcccgccttggcctcccaaaatgctgggattataggcatgagccaccgtgcccggcctggtttttcattttttaattgttgggaaaaaatgaaaaaagataacatttgtgacatagaaaaattacatgaagttcaaattacagtgtccaaaaattaagttttgtaggaacatagccacactcattcatttatgcatcgtctatggctgcttttactttacggtggcagagtttgtgtagagtttgaggaagaccgtatgtcccacacagcccaaagcatttactactatccggccctgttcggaaaaagcgtgcagcctccatctacgctttagagagtgcatatggtccagcaccatggacagcgctttgcgccatgctggtgaggagctaggatctgacaacagtcccggtatcggaggtcgttcacagagacagaaggaaatccttggcccaggaggtgccagagcatcagccaaggccacacaggaaatcaggggttctgtcccatctccctaactgtgcagcaatgggtggggattggctggtggtcaaagtgcctgtctgttgtttttgcctgtacagccaccatcctcatttccctgtgagctctctgtccctctcctactctcagcccagtgacctgagtggggctggcccctactccctgatcccatggtgaactggcccaggcctctcctgttagcatattccatcccctgactcagggatgtgttcagtgatgaggatgtgacccaagctagaccaattaagtgtcagcattgggcatttggggccactggaaaacaggtatactctttctttgaagatttctaatctcgtaggatacaaatctagattttctgggaatattttttccctttcttttttgaaacagtctctcaggctggaatgcagtggcacaatcagggctcatggcagcctcaacttccctggctcaggcattcctcctacctcagcctcctgagtagctgagaccacaggcatgcaccaccatgcccagttaattttttaaactttttttttttttgagacagagtcttgctctgttgcccaggctggagtgcagtggcatgatctcggctcactgcaacctctgcctcctgggttcaagcgattctcctgcatcagcctcccaagtagccgggattacaagtgtgtgccaccacatccagataatttttgcattttttgtagaaatggggtttcaccatgttggccaggctggtctcgaactcttgacctcaggtaatccacccacctcagcctctcagagtgctgggattactggtgtgagccaccatgctcggcttaacttttttttttttaaagatggggtattattgtgttgcccaggctggtctccaatacctgggctcaagcaatccacctacctcagcctgctgagattagagatatgagccgtgaccatgcctagccataaaaacatttttagggaagaaattctgggcccagctgggcctgatgacaattgtatgccttgatttttcagttgaatgggcccccaaattctctctttctctctctttaaccagtggagtagatatggctaattatctttaaaaattcatgtctacttccttccacagtagcagaattgcagcaaggcacatcactgctaagctagaccacatttcacagcctcctttgccgtcagatgtgaccatgtgactctcttcccaccaggggagtgagagcagagtggtgtgcaccatttctgggcctgggccacaaggcagggttgtgcctcctccacattctttcaccttttcccatgggttgaacccccagtgaactggctcattcatgtagactcggttgacttgagcagggccactcacgtctgactgaaaaagaaatagactgccttctttttttcagagacagggtcttgctctgttgcccaagctggagtgcagtggcaccatcatggctcaccgcagcctccaactcctgagctcaagggatcctcctggctcagcctcctgagtagctgagactacaggtgcacacctccatgcctggctcattttaaaaaatgttttgtagagacaagtcactatattgcccaggctcgtctcaaacttatgggctcaagcgatcctcctgccttggcctcccaaagtgttgggattacaggcatggaccatcatgcccagccgactgtctttaagccactggatcatggtcaggcctctttgttacagcagctagctggccctaactaatacaagcaataggaggtaggctcccagcactagccaggaaggatggttgctgatgcaaagcttctcaccatctgcacttcatcgtagaggggtccccaggctccagacggggggtacgttctttctacctcatcatacaagtgcccagggaaggccatatcctcatcttcacctgtgaaacctggagttggagtggaagggagacacgatcaaggcacccagtccaggcgtcgggggtacctctgagtgagggaatcctgacatggtcctaactcacctcgggaataagacacctcctcctgcgtcgggggcagctgggggctgaagtccctcagggagcggtaatacggctctgcctctgttgtgctgacctgttccccacacgcaaaacaaacaaagccctttccatcctctgaccccactgtgcccggaagggcaatgatcaacctgatgctaacggcagggcttcagtcgccgtcggtgccctgattgtggggtcaccagggccacccccacttaccgtggagctctgagtgtcccgctctcctgtccactggctctcctcatattcgttcctgactcggtcctcttccgaccttccaggatgaaggtgtggggggaagttgagtgctgccccccgccaccagtctcccccaaacctccctcagagccttctttacagaaaaatatccccacttaccctgcctctgtcttctctgagatgcctgaaggaaacaggaataaagggctcagtgaccctatgcaagccccccaccccggccccaggaagaccttcagtatgcagcaaccacagggttccctatcaccctcgggtctccaccctggcagggaagggtctctcctcaccctcagcaagacgcctgagtctccgctgccagaggacccccccgacacaggaggcattggagaggagcagaagccccccaagagcgaacagcacaggcagcaggggcagccccgagggtcctaggggtggaagatacccctcagtgaatcccagacaacaggctgtaggccaggggtgggtctccccgagaaagtgtagccctgaccaagtccctcccccagggtcagagaaacagatgggcagaggtctctgtgcccaccctttctgcccacccaagggcaggtggcttctttcttaagtcaagccattagcaaaacttcctccgtttgcttgaactctgcaaactcagaacggaactctggactcaggagggagcttcagctcgttagctgggcactgaagactttctgtggtccagcctcttcccacgcctccagccatgcccaccaaacttagaccctggtactggactgtccagccacacaaatcaaccaccagctgtttccagaatcactgaagcaaattcacacctcagagctttggaatagttaagtgtctgtcctcaaatgtcctttcttctcaagcaaacttctgtttgcctttcaaattctatctcaaggtcaggcgctgcagcacatgcctgtaatcccagcatgttgggaggtcaaggtgggagaatcgcttgagcctaggagctcaagaccagcctaggcaacatagtgaggctgattctttacaaaaaaaattaaaaatttagcagcatggtggtgcatgtctatagtcccagctactcgggacactgaagcaagaggattgcttgaacctggtaagtcaaggctccagtgagctatgatagcaccactgcactccagcctgggcagcagagcaagaccctgcctctgaaaaaaaaatcccatctcaaggacttctttattttattttgttttttaattaagacggagttggctgggcacggtggctcacgcctataatcccagcactctgggaggctgaggggttggatcacaaggtcaggagttcaaaaccagcctggccgatatggtaaaaccctgtctctactaaaatacaaaaaattagctgggtgtggtggcaggcacctgtagtcccagttacttgggaggctgaggcaggggaatcacttgaactggggaggcagaggttgcagtgagccgagatcacgctactgcactccagcctgggtgacagaatgagaccctgtctcaaaaaaaaaaaaaaaaaaaaaagagtctcactctttcacccaggctggagtgcagtggcatgatcttggctcactgcaacctccacctgcagggttcaagcgattcttctccctcagcctcccaagtagctgggattacaggcgcatgccaccacacccggctaattttttttttttttgtatttttaatagagacggagtttcgccatgttggacaggctgttcttgaactcctggcttcaagtggtctgcccaccttggcgtcccaaagtgctggcattataggcgcgagccaccgtgcccagcctcaaatgacttctttccaccaacttccatcccagccaatatcaggctgacttggctgctatatccctgaggacaaggctgaacccctctaagtaggcatctgttgggcgggcaatctcccctgtcttctactaatagcacttttttcccctggggagaacagccactccccaatctcagtcttgggttcaggcaggactccacagtgggcacatggcccggcctggaaaataagagtctccattcctctctccacagtgattgtttagacacaggcatttgacccaacgtgtgtttttaacaaaacatttaggacaattctactagctgtcaagaagatggaggtggaggagggcttctctgcccctctgattgaagaaactcagaaagaagccaccacagatgaaggcaaagttgagagagggtgagaaacagatcgctggtgagatttttgagcacctgaaagtggccacacttggaattttttatttcatataccaagactttttcttttttttcttgagacagggtctcaactctgttgcccaggctgcagtgcagtggcgtgagctcggctcattgaaggctcaacctcctgggctcaatcaatcctcccgcatcagcctcctgagtagctgggactgcaggcatgcactgccatgcctggctaattttttttgtttttgttttatagagatggggtttcaccatgttgcccaggtttgtctccaacgtctgggctcaagtgatctacctgcctcagcctcccaaagttccgggattataggcatgagccactgtgcccagccaagccattctttttcgtgttgacaaaacagctgcatttctgtcacttgcaacctttttctcgggctctgaaggggatttttttgccaaatggttgcaatcatctcccagtagtcacatccttgagtgcggggcctttccacactgactctgtgttgagccatgtgacttgctttggccaatgagacacaactatgacggaatcagctagtaaattgctgcttttgacccccgtgaccacctccatgtgaaaaagtcaagaagagacacgcgcccagttatctccattgttccaaccaagagccagatgactatcagaagtgtgggaagggggcaaccctagaccacccagtccagtggagctgccagctgactgcagagatgatttaagccagcccagaccagcactgttccgccagactcagaatcatgaggaagaatgttgctataagcacccatgtttggggtggttcattatacagcaaaagctaactgatgcaggcttcttacaggacatggagtgagctaattcttacggaattaaactaaatttggaagagaagaaaattta[140 bp omitted]gaaacctcatctctactaaaaatacaaaaaattagctgggcgtgttggcacgtgcctgtagtcccagctactcgggaggctgaggcaggagaggaagccgggaggtggagatagcagtcagccgagatcgcaccactgcactccagcctgggcaacaaacagagcaagaatccatctcaaaaaataaaaaaataaaaaaaaaaaatgccgagtgccgtagctcatgcctgttatcccagcactttgggaagctgaggcaggcagatcacttgaggtcgggagttcgagaccagcctggccaacatggtgaaaccccgtccctactaaaaaagtacaacaattagccaggtgtggtggcaggtgcctgtaatcccagcaactcgggaggctaaggcaaaagaatcgcttgaacctgggaggtggaggttgcagtgagccaagattttgccacttcactccagcctgggcaacagaatgagactctgtctcaaaaaaaaaaaaaaaaaaaagaaagaaagaaagaaaaaagaggaagctctaaggagtctgcaagtctgcaattctgcagggacagaactaagtcttttttttttttttttttttttttgagatagggtctccctctgttgccaaggctggagtgcagtggctcagtcatagctcactgcatcctccaactcctgggcttatgcaatcctcccacctcagccttctgagtagttgggactacaggcacatgccactacacccagctattttttatttttgcaaagatggagtcttgctatgttgcccaagctggtctcaaactcctgggctcaagtgatcacatgccttggcctcccaaagtgttgggattacaggcgtgagcgactgagcttggccagaactaagtcgttaagcagctgtgactacaagcagaggaggtagggtcagagaccaggaggttccattctcaggggagccgggagggatcaggggactgaggacttgcctgaaggtggctctgtgggcagctggtcttcaggttctccagaaggctggtggagacctggggggtggatatacagattgtgacttaacactaagaatctgagataagctttaaatatttctcagcctcttcttaagcctattagattcatgggaactggtatatgactgcttaagaatatttcaaagagagctagaaattgctgataataatgacaatactattaatagcaattctaatggtaacgctaatgctaagaataatttgttttttgagactgaacctctctctattgcccaggctggagtgcagtggcgcaatctcagctcactgaaacctctgcctcccgggttcaagcaattctcctgcctcagcctcccaagtagctgggactacaggcacctgccactatgcctggctaattttttgtatttttagtagagatggggtttcaccatgttggccaggctagtctcgaactcctgacctcgtgattcgcccacctcggccttccagagtgctgggattacaggcgtgagccactgcgcctggccatttttttttttttaaagagacagggtctcactctgtcgctcaggctggagtgcagtggtatgatcatagctcactgcagcctcgacctcctgggttcaagctatcctcccgcctcagactcctgattagctgggactacaggcatgcatcaccatgcctggcccaaaaattaactgttgatgagcactttcggtgtgcaaggtccttttcacccgaattatcaatttgttgagttaaccaaaaaagactttgggctctcgatcccttaataaaggtacaagttctaaagcaaaggaggcaagtgtcatactttatgttttagtgttcaaagggaagactggagtggggtggggggaagagcagagaagattgtaggggtgaaaaagtgtccttacttccattgagaaaaagcctgctctgtcaggaagaggaaaacagaaaggagaagcttgcggccaggagtggtggcacacgtctgtaatcccagcactttgagagactgaggcaggtggatcacctgaggttaggactttgagaccagcctggccaacatggtgaaaccctgtctctactaaaaaatacaaaaattagccaggcgtggtggtatgcacctgtaatcccagctacttggaaggctaaggcaggagaattgcttgaacctgggaggcagaggttgcagtgagccgagatcatgccactgtactccagcctgagtgacagagcaagattccattgcaaaaaaaaaaaaaaagaaagaaaagaaaagaaaagaaagaaagaaagaaagaaagaaagaaagaaagaaagaaagaaaaataaactgagccacaaagatctgtgctatatatttttagaaactgagacacttgcctatggtcacacaactaagaggtagcagagaggggatttgaacccaagcttctctggaccaggctctgaaggatttaccactacaatactgtgcctatcagaattgtaacatattcatcatattcaaggaatttgtccttctcatccaacttgctgaatttattggaataaagttatccataatattccctaattatcctcttaatgtctgtggagtctgtggtaacatcccttcttccattcctgttattggtaacttgtattttctcccttttatttgtcttaatcagatttataaatgttattgatttttttcaaataaccagcttctggtttcattgattttctcaattgtttttctgttttctaattcattcatttctgctcttaccattattattttcttctttctgtttactttgggtttaatttgttcgtcttttattagcttctttctttctctctctctctctctctctctttctttctttagatggagttttgctcttgttgcccaggctggagtacaatggcaccatctctgctcactgcaacctctgcctcccaggttcaagtgattctcttgcctcagcctcccaagtaactgggattacaggcatgtgccaccacacccggctaattttgtattttcagtagagacagggtttttccatgttggtcaggctggtctcaaactcccgacctcaagtaatacacccgccttggcctctcaaagtgctgggattacaggcatgagccacagtttcttaagatgaaaacttagaatatgcatttgaggttattctcttaaaaaaaaaaaaaaaaaaaaaacgaaaactagtccagtcgtggtggctcacacctgtaatcccaacactttgggagaccgaagctggtggatcacctgaggtcaggagttcgagatcagcctggacaacatggtgaaaccctgtctctactaaaaaatacaaaaaattacaggtgcatgcctgtaatcccagctacttgggaggctgaggcaggaaaattgctcaaacccaggaggcgggggttgcagtgagccgagacggcaccattgcactccaccctgggcaacaagaacaaaactgcgtctcagaacaaaaacaaacaaacaaaaagtggccaagcgtggtggctcacacctgtaatctcagcattttgggaggccaaggcaggtggatcacctgaggtcaggagttcaagaccagcctggccaacatggcgaaaccccgtctctactaaaaatactaaaattagctgggcatggtggcacttgcctgtaatcccagctacttaggaggctgaggcaggagaatcgcttgaacccgggaggcggaggttgtagtgagccaagatcatgccactgcactccagcctgggtggcagagtgagactccatctcaaaaataaaaaataaggccgcgcatggtggctcaggcctatgattctagcactttgggaggccaaggtgagtggatcacaaggtcaggtgttcgagaccagcctgaccaacatggtgaaaccccgtctctattaagaatacaaaattagctgggggtggtggcacatgcctgtaatcccagttactcagaagactgagtcaagagaattgcttgaacccaggagatgaaggttgcagtgagccaagatcacaccattgcactccagcctgggcaacaagagtgaaactccatctcaaaaaaataaaaaaaaattaaataattaaataaaataaaaaactaaaataagcacttaatgctataaatttccctctaagtactgctttaactgcaacctcaaatttttatatgttttcattttcatttaattcaaactattttctaatttcccttggtcattaatcacattcagatagtatgggttgtggttaacggttggtctcaagttcatctgcctgagtttcaatctcatctttatcttttactagttgtgtgaccttggacaatttgcttaacagctataggcctcagtaactcatcataaaaggggaatagtattgacttcaccatactaccctacacatcctctgaggaatactccaacctgcccaagcctcccttcccacctggggtagtgatgggaagctgggtccctttgtcagccagtccactgtcccccaaggcattactggccagcagccagaccctgtatcttgtagaaggctgtagaccagtcagcgtgaaggtggtggcctggggtggtacgacatccacatagtggaaccctggagtccccagggcctcatacctgcaggacagggggatagtaaattcagggaagtgccctagcccattcccttccctcctgcctcgacaaggacccacctgatgcagaacctctgtggcaggcccccatcaaagccaggcttccactccagccccacggagtgtggggtcagactcacaacctttaatcctgatggagggtcagggcggcctatggggagaaagatgggaaagcagtcagaggatacaaaagaattccagaagattctgtccaggttttccctaggaatgattttaaatatacaatcgcttctcattgttcatagcatactcatgttctgtaaggtcatggtgaacactgctctggcaaacaccaaactgtccctgtaatcccagtactttgtgagaccaagtctgaaagatgcttgagcccaggagttcgagaccagcctgggcaacatagcaagaccctgtctcaaattaaacattaaaataaaaaataattttaaaaagaagtaagtgaaaacaaaaccaaaagaaacagcaaaaaaattcaagaccaaatggttacttctatggaaaatgaagggttaagtttctttctttttttttttttctttttttttagatggagtttcactcttattgcccaggctggagtgtagtggtgcaatcttggctcactgcaacctccacctcctgggttcaagcaattctcctgcctcagcctcccgagtagctggattacaggtgcccgccaccatgcccagctaatttttcatatttttagtagagatggggtttcactatgttggccaggcttgtctcgaactcctgacctcaggtgatccacccgccttggcctcccaaaatgctgggattacaggcatgagccaccgcgcctggcatggttaggtttcttttcttttttttttcttttcctttttttcttttttgagatggagtctcgctgtgtcacccaggctggagtgcagtggtgcgatcttgactcattgcaagctctgcctcctgggttcacgccattctcctgcctcagcctcccgagtagctgggactacaggtgcccgccaccatgcccggctaattttctgtatttttagtacagacgggttttcactatgttagccaggatggtctcgatctcctgacctcgtgatccacccgcctcggcctcccaaagtgctgggattacaggtgtgagccactgcacccggcagttaggtttctttaaacgtctcatcatagcatttgcgtcaagcaatcaatacatgatttttttttttttttttgagacagagtcttgctctgtcgcccaggctggagtgcggtggcgcgaactcagctcactgcaacctccacctcctgggttcaaacaattcttctgcctcagcctcccgagtaactgggattacaagcgcatgccatcacgcccggctttttttttttttttttaagt[131 bp omitted]agagaaagaattctgtttcctctgggaattctaacagaccactgtgagggcccttagaataaagccaacacagagacatgcagacgtaagaatgaagagggctggtcatcacacctgtaatcccaccactttgggaggctgaggcgggcagatcacctgaggtcaggagaccagcctggccaacatggtgaaaccccgtctctactagaaatacaaaaattagctgggtgtggtggcgggcgcctgtaatctcagctactcgggaggctgagatgagagaattgcttgaatccaggaggcagaggttgcagtgagccaagatcgcgccatcgcactccagcctgggtgacaagagtgaatctccatttcaacaacaacaacaacaacaacaacaacaaaaagaatggagagttgctgatggcagctgaacctagatccagaaacccctgaaaatctatttttcagttacttgagctaacaagtaccccctctccatcttttttctgttcttttctttttcttttgcctttgttgtgggtcttcctgaagatccagtctccattaggattttcagggcaggcaaaaactccatcctcacacatacacagaacttccggtttcagaaacatgggcagcccagggccaatcagggatgtgggaatggatccagggagcaccccctccccaacaccctcacagcccctccatactgatgctgacaagttgaatgttggtttggtccgagccaagggcgttggtggctgtacatgtgaagagggcgtaatcctgggcggcagacacgttggcaatggtcaggaggctgctgtggacaccaccctggtggtatgtgtgctccgtgtacctagagagaaggtagggcaccactcacccttccattcacccaaccacttatgcttggaatcatctatgcatccatccattaatgtaaccgtctgcctatctatccattcatccatttatcttttcatccactcaaccattcactcactcattcctccacccattcgtcttccttctctgcagggactcagggaggggaagtggggctggaggtccagacctggggctggagtgctgcctggctgggcttgggctcacctgggatcttggagatccagagggaccccgttttttgtccaagtgaaaacgatgttggggacacctcgggcacggcagtggagggtggcagaactggtgctgtctccagctgcagccaccttagttaggggagtggggtgctccacctggggggcaactgggaggggatgggcagtcaacatgagctatgtgggagacatgagggctgtgggttcagtggcaggtcttgaagtcaggtgtttgggtaatacccacatctgacaacaagacggagcagccgtcgtgctggaggcgccaccccattgtccacaatgcactggtaagcgccagcctgggccagtttggcatggtgaatccgcaggcgccccgttggtcccctggatatcttctccatgtcatccaggctctggtcctcctcatcttctccctggaggcccaagagtccagaattggcctcccagtctagccccagatccatcactgcccaaattgtcccttctgtagcctcattctcctagccacaatcaccctccacagaggtattgaagaaaaaaaaattctcctgtcatccatctatccatttactcaatccatcttttcatccaccaatccaggcaaccacctacccatccattcacccaaccacttatgcttggaaccatctatccgtccatccattcatttatccatctgcttatctctccattcatccatttatctttccatccactcatcggttcactcactcattcctccacccatttgtcttccttctctgcacccatgtatccacccctgtagctctccacccattcactcaactattcactcacgcttgcacacccataaatacatgcatctgttcagacatttacccagctacctatttattcatctttccattgatctacccacccatccattcatcaattcatccatcatccttccatagatatctttcctctgatggtgtatccgtccatcatctaccctctatccactgatttttctccttcaatcatcttcccacccatccactcacccatttatccatcctttcacttgtccatctgttcctccatccactcactcattcatccacctgttcatccacttacctaccttttgacctatctatccatctacctacccactcgcctggctgtctagccatttatccatgcattcattttgccaccaacagttattcattctgggagcatgccctggcgagtatatagttataagggtcatacagatgtatgtggtccccactcccaaggaactcacagtcaagaaaccacaaccccttgaccccacctctattcaccaaaggctggatcctcaccagtctctcccagttgaacatgcccgggaggatgggattggcatcgacagtgcagactatgtccacagaacccccgacgttcacctcagtggggtcctggagggcacggatggtgggagcatctggtggaaggcagaggcttggggaagacacttgggcccagacaggtctgggtgtgagagggccccaggtgggagggatgtcttaggggttccaggaaagttatgggtgtggacacaatctgcccttaataccaaagggttggaggagagttctcaaggttggtgaggttgtctccaccctccactatgcctctgtgataattagagtgagttgagtgggcttccagaattgtgtgtgtagcagggcttatacagtgggctctcattcctgacgggagcagcttccgtgtctaggcgggcaccctctctgggcagagattccacactgggtctctctagtgggaggggttccgcagtgggcgtggttacaccgcggctgggacttccagaacgggagggttccaggatgggtggctatccctgggtgggcggagctcccacaatgaggagactccacaatgggcaaggttccttgggtgggtgtggtttccatggtgggcggggctcacagtgcacgtccagccgcagccgcgcttccgcggtgccctcagagttctggcagtgcagctgatagaggccgtcgtccgcgcgggtcacattccacagatgcagagccccgctggacaggatgcgatgccgggggccgcccgctggggaaggccagaataagggacctggcaggacctcccatccccgggacccctccccatgaccacttccctcacctggactgaggcgatagccgcggaaggtccagttgaaggcctcgggggcggggttagcggacacggacacgggcagcaacgcctcgccctgctccaccgcggtcaccaccagcacctgctcccccaggaactctggacggtcttcagagggggcgccgcagggagtcaagattgttgttaaggttagggtcaaggacagattggagatcaggcacaggttcaagggttaaagttggggtcacgacggggtttaaggttgtggacaaggtaacaagttcagagctaagctcaggggtaaggttcgggatagaagttagaatacagtttaggaaaagagcagaagccagggtcagtttgaaggatggaaacaggagtcatgaggggggttaggagagaggacaaatgcaagatgggaggaggcaggataggagttggcccaggaccacgggtcaggatgaaggtcgggagtttcaagtttcaggatggggttaatgatagagtgatagtgtcaaagcaaagacccaggccaggtgcagtggctcacgcctataatcccagcactttgggaggccaaggcaggaggatcacttgagtcaaggtgttcaagatcggcccgggcaacatagagtaatgccatctctatttaaaattaaaagtacaaaaaatcagcctagcatagtggcacgcgcctgtaatcccagcactttgagaggccaacgcaggagaactgcttgagcccaggggttcaagaccagcctgggcaacatagtgagaccccgttgctacaaaaagtaaaaataaactagcgaagcgtggtagcgcacacctgtagtctcagctactcgggaggctgaggtgggagtatcacttgagctcaggagttggagactgcagtgacctatgattgcgtcactgcattgcagcctgagcgacaaaaaatgaaagagagagagagagagaagagaaaaagaaggaaaaaaaggtaagacccaaggagtagtttagggtcaagaaggcatcgagaggggctttcaggccggggcacatacacagtacgttgaggcgatagaaggagctcacggtttcgcggagctcggcgctgtgggcgcggcaggtcacgcgctggccatgatcgcgggatgacacttgcagaaggacgctcctggcggcggcggagcctttgaatggggctctccggggtggggcggccacgccctccagcctgtggaaccggggtcaagccagggctgcgagcggagccagaggctggagaggcactaggcgggggcgggacatgcgtggagggggcgaggccagaccagagaggggagggatccctcgcactcccacctctccccttccttgtcccaggacaagttgaccggcggattgctgctgacgctgacgcatgtcaagtttaaggcgtctcccgggcgcagtgcggatgcgttggccaggatcgtcacgttagttgggggaactgggagacggggttggaggagcgagactcagaggttaggggcggcctggtctgcgtccaccccgcctgcaccccaggctccgcccagtctcgggtcccccaccccgcctccgcccgctttccccgggtccagggttcgctgggtccctgccccacctggctctgtccctcccgccccgcccccgggcctcagcagtgcgagccctcacactgcaccgccagctgcgtggacgcgctgagctgtccagccttgcacgtgaacttggcctggttgtccgacggccctgtgaccagcaccagctctcgggagaaggtgctcccagatttctccacgctgccgagatgcacgcgccgcgactcctgcggcagccgcgactcggtcacggtgcgcgagtcctacgggccgggagtgactggggttcgcaggcagccctgccgcttccaccaacccccaacccccctaccctgcccactgggttggtgccgccagcccaaacaaagcctttttctgataaggagaagcactctcatcagcaccacccccctagggcaaagcagtggggagtggaactgagtgaccccctccctggagtctctcccgcctccccgagtccctgtgcatggcagttttggggatctgaatccgccttctgtcccacacccaactcctgctctgcctctgcagccacctgcaggctctcagcgcactcctcaaaatctatttctgctgtgtttacccaacaccacctgcaggaaactcccttgaaattcccaggcctttcccagagttcctcagttccttttcttaaaattcctgctgtccccaaagatttcctttgaaattttccttaattccagtgtctttccatagattacttcctttttttattattgctgctgcacaaattaaactttccatagatttctgaatctttcccgatattataatatcttatgatcccagtcttttaacagattcctttgtattgcccagattctcagcacttccccagaattccatccaattaaaataaaattccattgtcatttctataatttctagtcttccccccaaagttttcaactagctccctaattcccaggattctcctagaattctattaggcttctctttcattttaatgaaatttcattttcttgcctccaaatcccaagagttcagtttaatactaatgaatttccgatagtctgtggaattactagcttttctccaaattttcttttcttttcttttctttttttttgagacggagtctccctctgtcacccaggctggagtgcagtggcacgatctcggctcactgcaagctccgcctcccgggttcacgccattctcctgcctcagcctcccgagtagctgggactacaggcacctgccaccacgcctggctaattttttgtatttttagtagagacggagtttc[140 bp omitted]cggtctcgttgcccagactggagtgcagtggcacaacctcggctcaccacaacctgggcctcccggattcaagcaattctccagcctcagcctctccagtagctgggattacaggcccccgccaccatgcccagctaattttttgtatttttagtagagacagggtttctccatgttggtcaggctggtctctaactcccgacttcaggtgatccgtctacctcggcctcctaaagtgcttggattacaggcgtgagccactgtgcccagccaaattttacagcattgttttttttttttttctgggattcaagtctttccctaaaattcctgacatttcacctgaattctgagggttttcactagaattttctttaattttaatgaaattaccttttctctagaatgcctaatcttgattcagaattccaatttttatcctaaaattctcactgtttccccagaattttcctaggattccatttaattctcatagcatttgtgtctttcctgattccctgccaaacctcagaatctttagtacttttcaagaaatttaatctttttccaagattgcccaagattctgaaggagagaaggggcctggtccttcccccacattcctggccacccccatagccctggcgtggcaccaaccttgtaccacatgagggagggctctgggttgcccccgatagccaaacacaccagcctcacccgggtcccagcccggagcttctggccctctgggggaccctcaatccacagtttctgggcgggatctggcggggagaggaaggaagaatgactttttctctgtgctgggtcctgaggcttgggggcattgctgggccagggcaggggctcacattttacgttcaggatgagcgacttcttgaaggtctccttggtgaaggcttcactgaaggcctcacatgtgagggtcagaccgttgtcctcccgccgcgccaggaatgtcaggttggacatggagatgtgaccgccatgcagtccctggcagggagtgagcttcagacgtggggactgcagcacccctatccatcgtgctagaggcctgagtccatcccagtccccagcagggacacaggagacatctctacctccccctctgttggacccatggtcctcaaggagaaagccccccaggctgctggacccaccccttccctatccacgagtcatgccctcagccccctccatgctcagacccaggagcctggcccccgcctcacatccatgactgtctcctccatgggcagcagctgccgccagcccagccaccatcgtagcagaacccgcgggcgactggacttgctgacacaggagagtgtcacgttcttgttctcagtctgggatgcagatcccaagataataatggcactagggggaactgcagggacagagaaggaagacactaagctgggctggatttctcacagaccagcccagacagaacaggactggagacagatgctgagatctttggcatccagtaggcataatttgggggcacacacagatggttctctgaggcacagaccgacaggggggcagctggcaccaggactcacaggtgacctgcagtgtgatgccgtgctcctgggtccctgcagacacgctgttgtgggcctcgcagctgagctgcgctccatggtcttctggcctcacggtcatcaccagcacactgcgggccaccgcctgggtgtgctctgtgccccacgctgtggacaccggctggccattctggagacagggacaggcctgggccagctcaggactggctcccagaccccactgtccccccattccccatgcccgcgtttgccctcaccttcagccactgcagtgtggctaagggattaccccctcgggccacgcacggcagctccaagctctgtcctgcccgcacgtgcccctcatccaggcctggccactcgatgacagggggtcctggagggactgggggatatcagtcactcagtgggcctggagtagcccatccactctttccaggccccacaacctgcctttgaacccccatgtttctctgagtgcctgaatttccataatccctgtgatccccccacaccccccagtgcctgctccccatcctcagcgccctagttggcccagttctccacttacacagaacattcacggtgaatgaggccttgatgggggcctccagtgctgggctagacgcctcacagaccagcaactgcctattatctgagctccggggtgtcaccctgggatgagaagtcagggttatagagtcagagtcatcatctgaaatttggggagtcagggagaagaggtggggatgtcacctctggtccccacacctggtctaagtccccatgctgatctcctctgggatccagggttccatgggagagattttgggggtgaacagtgagaattggagcctagagagccccacatctgaccaaaactttagtgcttgggactctagaactgaggttcccatgaagtttttttgtttgtttatttgtttgtttgtcttttgagacagaatctggctctatcacccaggctggagtgcagtggtacaatctcagctcactgcaacctccacttcttgggttcaagtgattctcctgcctcagccccctgaggagctgggagtacaggcatgcgccaccacacccggctaatttttgtatttttagtgaaaacagggtttcac[131 bp omitted]agaattgggtcccagatgttcatacctagcccaagcttcatgcttgcatccctggggtctggggttcccatggggaaaattaggggtcaaggttggggggttgtttcagtttccacacctggctgtggcctccacagtgaagagtttctgctgggagccctcgttcacgtttgcagagatgtcagatattgtctgtccaccttggggcagcaagagggctagaggggttccaggctccccgcaagatagattctggggagcatggcctggaagtcctcagggtgggtgcgatgccccctccctcctcgttctagaggaaaagggcctggggcagagctgcatcccctcccgactttctggactgcctgaatgccgcagtcttcagtgctgggtcctgggcctccccgctcttctcaactccttgctgggttgtaccatgcaccctatccctcagcttctcatgtctgcaccagcgctactgcccatatttctatctgggcctcagccttgtgctggttgctgccgccctcgatgtgccctcgcatccactgggtcccacactggcctcagcatctccccacaccttctcctgggtccccatcccagggatgacatcttttctggggcccttagaagggtactggtcaggaacacacacccttcccactccagaggcttcatgctgccccctgccacccagttcacccacactcactcaggagaatggtgatgtcaggtgctggcttcgcgtccccagacacacagttgaccacgtactcctgcccagctacccaggtgaccatggtgcctgcctctggggtcagcaggagcagcttgggaggaactggtgagagaagggtctggggtaagcttccagcactgagaaggacttgaagattggagttcggtacccagagtctgggagaggagaggctgggggcttggacttccgggttgcggggtaggggagggcttgaagcccagactcatgggtcctgggcgtctctcacccatacccaggatggagaggatcactctgggagacacgagctcgggccccatctcagagcggccgacctggcactcatactccgcgtcatcgctgaggtcacaggcctcgatgtgcaggtggaattcacctgcagggggagccggaagtcagggccgcagcttccgctggtggctgagggtctcaggctctgatcccttacctctagcagggtccccttccaggcggtacctcgggaagcctgggatcctggggtcggggcccaggagcagcccatctttggcccattgcaccgcactgccaggggtgctgaccccacaacgcagctccactgaggccccctccaccaccgtcaggttttcaggcagggcccagaagccccggggaacggaggcaggaatcgccaactgcgccaggcctgaggacacagcgcggtgcaaggaaagggcagagggtttgtctagggaaggtaagtgggaaatgggggccacttggcgctgggtacaaggctgggatcccactcaccttcagtcagcagccccaggagcaggagagaagccctgagcgtcgtccccagggccatcacaggtccccctactgtgacccccacagcgcccgctgccagccacctgcgtctgtctggctttctctgggtccctctctgtgtgtctctgccacctgcttttcttttttatctctttccgttactctcctccctttctcgttttcctcttcccctcttccctgtgagtatctctctctgtcttgctctcagtctcaatctctgagtctctttctctgtctctttaaaaaaacttttttttcttttttcttttttttttcttttttttttttttagagacggggtctcactatgttggccaggttgatctcagactctttccttcaagccatcctcccaccttggcctccccaagtgttgggattacaggcgtgagccactgcgcccagtctctttatctttccatctttctctccttgtctaagccgttctctctccttttgtctctgtctcttcctctctctctgtctctctctctctctctctctcaatctctatcttctctcctgccacccctcactcctgctccttgtctcactactcacagcctttcaagaaggacctgcagcccagagtccagcaggccaggagcctaggagagcgatgaggctgatgcaggcactggcagagtcagccctgctctctgacccagcttgagctcattctcacagtgcaacctcccccaggtaccttccagagcccccagctctggcctctgcccagcaggctcctcccagctggcccagctggagcataaaatcccctgtcagcacatgccaggcgcgttcctcggtgcctccccagcctccgtgaccccagggcctggcttaggctgggaagatgggagaagtcagatcaaggtggtctcccagctcagcaggggagcagccagctgggcccccagctcttccttgccctgatacatgaccttggcaagtctctttctttctttctttcttttcttgagatagtcttgctctgttgctcaggctggagtgcagtggcatctcggctcactgcaacttccacctcccatggcttgaacctcccaggttcaagtaattctcccacctctgtctcccaagtagctggtgctacaggtatatagcaccatgcctggctaatttttgtatttttactagagacggggtttcatcatgttggccacgctggtctcgaactcctgacctcaggtgatccatctgcctcagcctcccaaaatgctgggattacagacatgagccaccgcacctggcctcccttccttttttagtagacatcagtgcctaaatgatgtcagggatctctgctggggaggatgcaagagtgagtgtgacaggctgggagagtgtgggagagagggaagatatgcatgtgtgtacgtgggtgtgagagtggggaaggttagagtgaactgcgatctgtaataagcatgtggagagcgtgtgtgtgacagtgtcttacgtgggagtgcacagggtgtgggcgggagtaaaaggcagagtccaattccaccggcccccagtgtgggtgcagtgtgagcccaaagtgggcgccctttggcaaggactgcatgagctttcttctccctctttttcttgccctctctcccatctcttctttccttctccatgtctctctctctccctccctctatctatcttgatttatctttctttcttttgagatggaatcttgctctgttgcccaggctggagggcagtggcatgatcttggttcattgcagcctcaacttcctgggctcaggtgatcctcctgcctcagcctcctgaatagctgggactacaggtgcacaccaccactccagctaattttttaaaatttgtttgtagagacagggtctttctctattgcccaggctggagtgcagtggtgtgatcatggctcattgaagcctcaaacctcctaggctcaagtgttctttctgcctcagcctcctgagtagctgggactacaggcccgcatcaccactctggctatttttttttttttttttttttttttgagagggagtcttgctctgtcacccaggctggagtgcaatggtgcgatgttggctcactgtaacctccgcctcccaggtccaagcgattctcctgcctcagcctcctgagtagctgggaatacaggcattgaccaccacacccagctaatttttgtatttttagtagagacggggtttcgccatgttggccaggcaggtctcgaactcctgacctcaggtaacccacctgccttggccccccaaagtgctgggattacaggtgggagccgctgcaccccgccacttggctaattttttttaaatgtttttgcagagacagagtcttgctatattgcccaggcttgtctggaactcctgggctcaagcaatcctcccatctcggcctcccaaagtactaggattacaggcatgagccaccgcacctggcccttgatttatctttcttttttttcttttttctcttttttctttttttgagatggagtttcactcttgttgcccagactggagtgtaatagtgtgatctcggctcactgcaacctctgcctcccgggttcaggcgattctcctgcctcagcctccctagtagctgggattacaggcatgcgccaccacgcctggctaattttttgtatttttagtaaagacggggtttctccatgttgatcaggctggtctcgaactcctgacctcaggtgatcagcctgactcggcctcccaaagtgctgggattgcaggcgtgagtcattgtgcccagctgatttatctttctatctttctccatctgtttgagactctctcgctctctatattaagttgttaaatctcagtcaatctttatttcactgtgtctctccatctctatatgtctctgttattctgtttctctgtctctgttctcacctctgtcgctcccctcaccccacagtctgtctcacacacaccaggagctccataaatatttgttctcagccacactctgaccacgcctctttctcttatgtgtctctccatctccgagtggctctgctcatcacatccctggattttataaccatatgctggtgggcctgccctccccgcgtgcacatacacttgcctgggataagcttcttctgcctgcttatctcctgcgggaattggaaatgctagttttctccctacctccccaagacccccgccaatatcgttcccaggaacaagatgaggcatctggcctcagcccccagcttcatcctcgatgctggacttccatcttccctcacatgcttgactccttgccctcctcccacctcccctctcccaactgctctctacaccccctgggaaatgggctggatgccgagctgggggagtggctctgtcctgggggccctcgccagatggtgtccctaggtgccagagcgtggagctgtcccttgctggggcctttaataagcacaaaccttccaccctccaccttggctgttttccttctctgcatgctcctgggaccttgggctctccatctttccatgtccgtagccccagagagccaggaaggggaagcggcgtcaagtgcctggaaaaacagccccatgacttgagttcctccctaagactcaggagttccagccccatgtccatcctatttcaaaatccaggcactagataagccacacagaagccgggagtgtaggcccccagatccctcccctctcagaccctggggtctcagtcccttctctccaaggactcgggaatttgggcctctgatcctcctggccacactacccacccccgcacctccccatacacacacacacacacacacacacacacacacacacacacacacacacacatacacacaggacttaggacagatgttcacggtctgatttccaaatcctcctgggcctgtgtgggggtggggagagattggcagatagatccaccgactcttaagacttaagaccagatattctgacccctgtcaccctcttccaagtgcaccatgcacttgagtgcaccttgagtctccagcctctcaaggaaccgggagatcaggccatcagcgtctcagccagcaaaggcctgaaccaccagtcccttataaccctgtaagtccaacccccactcccaaccccactcccccatttagggacacggagtctgagcctaagaacagtggagaatctgaatgtggaccctccagttcttacaggtccaggaatgtcagatcagggtcccagccccccagccctccttcaggctgctcggggtccctcccacctgctcggccagctgcgcagcgtgggaacgccccagctgggctgcatggagccgtcaggacaagctgcgcggttcccagcctccctgcctgccccggcccggcaccgccgcctcccagccgtcgccgggcaaccaggccgaggggcccggccggccgagtggggagaggggttgggctgggactgcggggtcctgggaaaggaggggccgagggcctggattcctgggtcttaggacgtgctgtagtttgcagcaataacaagggaacagagggatattttgaggaggggttttgaggctgggggagtcgaggtaggggtcccaactgtcccccaggtatcggtgtgccctcttcccgacacgcaggcccgggggagccccggaccccgcatcccccagggcgcggaaactggcgaggccccaggagctcccatttatagctcagtttccactgagcgcagtccctctaggacctgggctgagcaagtttcttccactctctcccttccctcctcctcaccccttgcctgcccctcaaccccggcagggcgcaggtgtccaacccagccgggaccccctccctcctcgaacccaggtgttccggctcccagaccccaattgagctgggggcgcccacccgccgggggatcccgccctgcgtcccccattcatccgcgtctcagccgcgggagtttctcaacgggaagagggcggagctcccggggggcggacccgggcggggcgagcgggatcgggccctcttggggtctcccagagacccaggccgcggaactggcaggcgtttcagagcgtcagaggctgcggatgagcagacttggaggactccaggccagagactaggctgggcgaagagtcgagcgtgaagggggctccgggccagggtgacaggaggcgtgcttgagaggaagaagttgacgggaaggccagtgcgacggcaaatctcgtgaaccttgggggacgaatgctcaggatgcgggtccccgccctcctcgtcctcctcttctgcttcagagggagagcaggtaccgcacgaggggagcggaggaatatggggtgggggtggggagttgcttgcgggctgcctcttcactagcgagaagggagctgggggctgggactcctgggtcctgaatgaggaggcccctgaaggtgctaagctcagccctgctgccccgaactctcctaggcccgtcgccccatttcctgcaacagccagaggacctggtggtgctgctgggggaggaagcccggctgccgtgtgctctgggcgcctactgggggctagttcagtggactaagagtgggctggccctagggggccaaagggacctaccaggtaagagtgttctctccacgctgggacgggctggctagggggagagttgctgggctcggctgtacctgcagtttctattttgacattttcaagtttgggaaattgatgggctcgggtaaacatttaggagtcctgatttttgagctgcttctttgggggtgacccacggagtttgggaattattatgttattgcaaaatagtacataggccaggtgcagtggctcacgcctgtaatcccaacgctttgggaggttgaggccagaggatcgcttgaaaccaggagtttgagaccagcctgggcaacataacaagaccttatctctacacaaatgtatatatatattttaaacaaattagccgggtatggtggtgtgcatctatagtcccagttactcaggaggcttaggtggtaggattgcttgagcctaggagttcaaggctgcagtgagccatgatcaagccactgcacttcaggcaatggtgagaccctgtctcaaaaaaaaaaaaaaaagagaacataaatgcaaaaaagtacagtaaatataaatggaagatttaccaaataaaatagacacacacagccaatacccaagtccattgctagctccccagaagaccccgtgttcctttcccctatcatagccccctccccctcactccagaagtagtatctaacctaatttttatggcaatcattttcttgctttccttcctgactttattacccctaagtttgcagtgactctgggttgggagggagttagagtctctctgggcccagtacacactttttaatagtgtcttaccaccaaatgtgtgggccagttttctggtggaggatgtctggggatggaggcctgaggccaggatttcagaaccatggtgtgctgactgccttctccctgactccagggtggtcccggtactggatatcagggaatgcagccaatggccagcatgacctccacattaggcccgtggagctagaggatgaagcatcatatgaatgtcaggctacacaagcaggcctccgctccagaccagcccaactgcacgtgctgggtaaggacctcgcccacttgtcccctgggagcccaagagggcagcccgtactagctgtgagtagcagagcccagggagcccaggggcatggtcaattggagctgagaagatcaggatccatctctgaccccaaatccaccttgcagtccccccagaagccccccaggtgctgggcggcccctctgtgtctctggttgctggagttcctgcgaacctgacatgtcggagccgtggggatgcccgccctacccctgaattgctgtggttccgagatggggtcctgttggatggagccaccttccatcaggtcaggtccaaattcctgtgctagcctttgcccattgagggaaacttgggttacactctgaccacaggctcatccagaagagaagaagacatgggagggcagaggttcatgggtttggactcttgaaatatgatgcagggtaaagattctagggccagactacctgggttcaaattatgtctcagccacttgctagttgattgatcttgagtaagttagttaacctctctgtgcctcagttgccttatctatacaatcaggataatagtagcatgcatgtcatagggtattgtgagaattaaataaataaatacctataaatgcccagaagagtgaccaatacatagtgagcactatataagtaaggcaagcttgtccaacctgcggcccatgggctgcatgcagcccaggatggctttgaatgtggcccaccacaaattcataaactttcttaaaacattatgagacttttttgtaattttttagctcatcagctatcattagtgttagtatgtgtggcctaagacaattcttcttccaatgtggcccaggaaagccaaaagattggacacccctgatgggtagatggcattattattcttatccttccctccagaccctgctgaaggaagggacccctgggtcagtggagagcaccttaaccctgacccctttcagccatgatgatggagccacctttgtctgccgggcccggagccaggccctgcccacaggaagagacacagctatcacactgagcctgcagtgtgagtgcagctggccctgggaaagaggggtgtggggccctgactcctgggtatgaggaaggaggggactgtggcccttggggaatgaggaaactggagcctggactcctggatctaagatagcaggagagggctgggtatggtagctcacgcctgtactcacagaactttgggaggtcgaggcaggcggatcatctaagatcaggagttcgagaccagtctggctaacatgtcgaaaccccgtctctactaaaaatacaaaaatttgccgggcgtggtagcacacacttgtaattccagctacctgggaggctgaggcaggagaatcacttgtacccgggaggcagatgttgcggtgagccgagatcatgccactcagcagcagagtgagactccgagcaggagaggacagacagctggggtccctggggaaagagaaagctgggccttgactctcacatcggggagactaggagagggcagaaggctggcacattgaggtaactggggaaattgggaactgaaagcccagactcctggctcaaagggagaaggggattaggggcccagactcctgggatggaggaaccagggactggacacctaggccagtgacggaggtgttcctggtccttgcccatctgaccattgtcccaccctcacagaccccccagaggtgactctgtctgcttcgccacacactgtgcaggagggagagaaggtcattttcctgtgccaggccacagcccagcctcctgtcacaggctacaggtgaggacgaagacccacctctccccagccccaagagtgagcttgggaagggctgggacctgagtaggtgtgccagagaggccaggacaacgttaacagcgccaccatttcctcaggtgggcaaaagggggctctccggtgctcggggcccgcgggccaaggttagaggtcgtggcagacgcctcgttcctgactgagcccgtgtcctgcgaggtcagcaacgccgtgggtagcgccaaccgcagtactgcgctggatgtgctgtgtgagctggggccggcctgtgggtgtggtcaaaggtggccgtggctttcagggctgttgagggtcggggcctggaggggcggggccgggagagcgagcgtggggtattaggaggaggagagtgtggagctggggcatattcttgcgccctagagggtgtggtgtttctgtggggctggctgatcccaggtcagtggctgcattccgccccggccatgtgacccctagtctctttcgtccagttgggccgattctgcaggcaaagccggagcccgtgtccgtggacgtgggggaagacgcttccttcagctgcgcctggcgcgggaacccgcttccacgggtaacctggacccgccgcggtggcgcgcaggtacagccctaaatctgaggcggtggctggagggggaccaggcttccttacaaatccggcttctgacgccccttccctgtcgcaggtgctgggctctggagccacactgcgtcttccgtcggtggggcccgaggacgcaggcgactatgtgtgcagagctgaggctgggctatcgggcctgcggggcggcgccgcggaggctcggctgactgtgaacggtgagaaggcggggcttcctaggggacctggcccgtcctgggatagggagcggacagagggggcaagggctaatgcagtgggagtggcctggaaggagctttacacccagcgggggctggagaccggacctattgaaggcgaggcttttaggagaatcggagtttggaggcggcgtggcctgattgattgaggttagcggagagtgcgctggacagacccggctttgttacagcctttggggagggcaagacctctcctctgagtgacctacagtctccatcccagctcccccagtagtgaccgccctgcactctgcgcctgccttcctgaggggccctgctcgcctccagtgtctggttttcgcctctcccgccccagatgccgtggtaaggaaatgtcactcctcccgtgacccatccagccgtgatccctgacctcccacctggccccccgaaactactgtgaccatttctgacttcccagacatccctcctgcttcttcctcccctcctcagtctcctccgtgtcctccctcttttgtgcccccaggtctggtcttgggatgagggcttcctggaggcggggtcgcagggccggttcctggtggagacattccctgccccagagagccgcgggggactgggtccgggcctgatctctgtgctacacatttcggggacccaggagtctgactttagcaggagctttaactgcagtgcccggaaccggctgggcgagggaggtgcccaggccagcctgggccgtagaggtgagaccccagcccgaagaccccaaatctggagagtctaaaccccacaaacgcagggatcccccagccgagggctgcaaaacctcataccctcaaatgcagaggagacctccaaacctcgggagtctcaaaactgtgggctcattgattcccaagacacccctcaaccacaaatgccttcacattctgaatcctaaactgagagactcctcacacctaggggccccaaaaagggaaactccaatgattgcaaagcaaattgcaaagtaaaggacccctcaaattctaagactccctaaagccagggagtttaaactcactctcaaacttggggaaccccaaattcaagggcctttgaatcttcaaatgtgcgaccttttgaacccaggaatcccaaactcaatccctgagcccccgcttcctggttccccctcagccttctcaggatgtcccctctgctccctgcagacttgctgcccactgtgcggatagtggccggagtggccgctgccaccacaactctccttatggtcatcactggggtggccctctgctgctggcgccacagcaagggttagtgcctgagccccgccccggctcccgaggccccagccccacacgcgccctgcctgcccagtgacctgacctggccttgggccttggctccagtcccatttccagctctgcacagggcttagctctccttcacgttctggttccctccttaagccctaactaggccttcccagggtcacactcctcggtgggaatgattcttattggtttccaacagccctacccaatcagcctcattggttcccagtcctctctcttcccgcttattggtctgcacacattgtgaccccgcccatcgcttaactccaccggtcgctgtttgtcagcctcagcctctttctccgagcaaaagaacctgatgcgaatccctggcagcagcgacggctccagttcacgaggtcctgaagaagaggagacaggcagccgcgaggaccgggtaggatgccagggtccccagacctgactgtgcctccagacctaaataatagcccagtcccaagagggtccccaaattcaaataggactctaaggccaggcatggtgcctgacgttggtaataccactttgggaggtggagacacaaggatcacttaaggccaggaattcaaagccagcctggacagcatagcaggaccccatctctacaaaaatacaaactaaaataaaataaaaaatgaaccgggtatggtggcatacacctatagtcccagctactcaggacactgaggtgggaggatcccttgagcacaggaggtaaaggctgcagtgagctatgattgcaccatgcactccagcctgggctacagagcaagaccctgtctccattttttttttttttttttatgtaggagggctctagtctttttttttttggcagaatttcactctgtcacccaggctggagtacagtgctgcgatctcggctcactgcaacctctgcctccctggttcaagtgattctcttgcctcagcctcctgagtagctgcgattacaggcgcccaccaccacgcctgactgattttgtatttttagtagagattgggtttcaccatgttggccaggctggtctcaaactcctgacctcaggtgatccacccgcctcgacctcccaaagtgctaggattacaggcatgagcctccacgcccggcctgagggctcaagtctttttttttctttctttcttttttttgagacggagtcttggtctgtagcccaggctggagtgcagtggcgcgaactcgactcactgcaagctccacctcccgggttcacaccattctcctgcctcagcctccagagtagctgggactacaggcacccgccaccatgtccagctaatttttttgtatttttagtagagacgaggtgtataccg[140 bp omitted]caagtccatgcccctgacccaattattccctaggcccagtatgtccccacagcccgtttttgttgttgttgttgttgttgttgttgtttttgagatagagtcttgctctgtcgtccaagctggaatgcagtggtgcaatccagactcactgcaccctccacctcccagttcaagtgattctcgttccttagcctcctgagtagctgaaattacaggtgcctgccaccatgcctgcctattttttgcatttttagtagagacagagtttcggcatgttagccaggctggtctcaaacttctggcctcaagtgatactcctgctgcggcctcccaaagtgctgggattacatgcatgagccactgtgctggcttcttacagcccttttattgtcctgagtgcagtccccagctcttgggtgctcttactccctcctgcctggcctccactggctggctgaaggtccttggggtctggcattggggcggggggatcctctgactattccctctcactaagttccctaccccagggccccattgtgcacactgaccacagtgatctggttctggaggaggaagggactctggagaccaaggtgagtgttgagaggggtggggctcccttcactgttgggagaggcggggctcccttcattgtgtttccgtctctctcccacgcctgtcccctcctttttccttctgttgtcctcagagttgggactcagctccccaccccactcctcctgccccctgggccatctcactcagctcccagcctcagtttgcctgtctgcagactcttcccacacatctgtcccagccctagcctccatctggagccccagaccagggctcaccctgcctgtgctctcctcatcacggtcaagccccctttcagccaccaggtcctacactggccccacatctccccagactggttcttcctctggggtcctacctcaggacagccacattgactccaggccatccccaggccagagcacttctctctctctctctctcctgcgtacctagcacatgccattctctctcttcttttttttttttttttttttgagacggagtctcattctgttgcccaggctggagtgcagtggtgcaatctcagctcactgcaacctctgcctcctgggttcaagccattctcctgcctcaggctccctaatagctggctaatttttcttgtatttttagtagagatggagtttcacca[138 bp omitted]ttcccatgtctacctaattccttcctttagtcctccagtctcagctcagacatttcttgttctaggaagcccatgcttccgtcatgacagctcgatcattttgcctgtgttccacccatcacagccatgaccactctgatctgggcttccttatcccacccactatgctgagggctctaccatcacagcccctgtcattgcctatgcctttcccaggcacagccctgacccctctgggtactgtctcatgatctgtcatttttcctttggtgtgggattctgtgaggacagggtccagttctatcctagtgacatgccttgtagcagcaacacagggtgtgacactgaatcaaagcctagaggctgttgggcaggtgagtgtctctctcctgttccctctgcaccttccacaccgacacccctcagcaggcctatatccctccgtctctacctttctctgcctatgtcctatccatttgcctcttatcactgttcctctgtctcactttctctctctcccagtccatgtgtgtctctgtgtctctgcccactcctgtctctttttgtctctctcaaggtctggtctatttcagtgtgtctctccatcagtgaccctcatcccccctgcacgctcacagactttactgagtcccatttgtcccctcaggacccaaccaacggttactacaaggtccgaggagtcagtgtgagcctgagccttggcgaagcccctggaggaggtctcttcctgccaccaccctccccccttgggcccccagggacccctaccttctatgacttcaacccacacctgggcatggtccccccctgcagactttacagagccagggcaggctatctcaccacaccccaccctcgagctttcaccagctacatcaaacccacatcctttgggcccccagatctggcccccgggactccccccttcccatatgctgccttccccacacctagccacccgcgtctccagactcacgtgtgacatctttccaatggaagagtcctgggatctccaacttgccataatggattgttctgatttctgaggagccaggacaagttggcgaccttactcctccaaaactgaacacaaggggagggaaagatcattacatttgtcaggagcatttgtatacagtcagctcagccaaaggagatgccccaagtgggagcaacatggccacccaatatgcccacctattccccggtgtaaaagagattcaagatggcaggtaggccctttgaggagagatggggacagggcagtgggtgttgggagtttggggccgggatggaagttgtttctagccactgaaagaagatatttcaagatgaccatctgcattgagaggaaaggtagcataggatagatgaagatgaagagcataccaggccccaccctggctctccctgaggggaactttgctcggccaatggaaatgcagccaagatggccatatactccctaggaacccaagatggccaccatcttgattttactttccttaaagactcagaaagacttggacccaaggagtggggatacagtgagaattaccactgttggggcaaaatattgggataaaaatatttatgtttaataataaaaaaaagtcaaagaggcaagtgtgtcttagggagtctactggcattatcactctccaccaaggaaggggtcccttagacctgtcccaaggtccctcctctaccctagcctatgaggtggctgtaggagtaaaactgtgagccacctctcagcctcttgctacctgcaaagcactctaggctctttttttttttttcttgagacaagatctggctctatggcccacattggagtgcagtggcatgatctcagcccactgctacctctgcatcctgggctcaagccatccttccacctcagcctcccaagtagctgggactacaggtgcatgccaccacacccagctaatttttgtatttgtttgtagacagggtttcaccatgttggccaggctggtctcaaactcctgacctcaagtgatccgcccacctaggcctcccaatgtgctgggattacaggcatgagccactgtgcccagccatgggctcttttaatatacatcttcacacacacacacacacacacacacacgcacacacacacatgagttgcaaacagaaaagacacacacataggcatgtatgcacagacacacgcatagatgtccacacagttgcacacaagtgacagggctgccccaggggtcctggggaagactgaattctaactctcattagaggagacaaacaagtgagccctgaagtggagcagggaaggggagactatgggtaggaaaatggcaatcccctggtccttacagcaagcgtggagatccagaccctaatcctgaggtgctgcatccacagtgggcatggtgctggtgcctgcttggatgatccttaaagaaaggtcctgggggctttggttcatggatccttgagctaggagttaaaggtccaggcccctgggacccttgggaagcagagcaagaagagtgaactcctgggtctgaaggagaatgggctgggggcttggtctctggtcctgagagagaaggtgcccagacttctggatctgaaagaggaagggactaggtctcaactgctgccttcttgactggggacattttggaggcctgtattcctgagccctcaacagaggaatgtactaggggatgggggtctctgatgcttgcatccttggaaaaggacaaaactgtgagtgtctgggtctaaagagggtgagagtcctgcgggaggactcaaaatccacaacgggcggagcccatagccggactcctggctgggcccttcatggggcgggacgcctggaatctcgaggggcgggggcctggcgcaggctcccgcccggggttcccgagctgctccactctgcgcgaagccgccacgctattgtcctgaccaggaaggcggggccggcgcggggcggggctggcggcgccggcgcagcccgggggcggcgggaggaggaggtggcggcggtggcgctgggagctcctgtcaccgctggggccgggccgggcgggagtgcaggggacgtgagggcgcaagggccgggacatggggcccgccagccccgctgctcgcggtctaagtcgccgcccgggccagccgccgctgccgctgctgctgccactattgctgctgcttctgcgcgcgcagcccgccatcgggagcctggccggtgggagccccggcgcggccgaggtgaggccgggccgggtcctgggggatgggggaaggggcgggaccgggtctctggacgccggcgcggacatgtccagggcagaaagcgcggtctttccagccaggtggtcagcccccaggcgcccccaatcacatttatgaacccagggttccaggccccagctcccccatcatgcgacgtcccagccccctcccatctcgagcataggaactggtctattcagagcccctggtcccagaagtccagccccctctccagacccaggtgactcggccccaaccccctcccgcctggacataggacccaccaagcagcgaggcatttagatccaataatccagaccccttgtattctctggacccatatggaggcccttgcagcctcccaggacccaggagtccagtccttcagtcaccacccaccccaaccagatgtagctctccagtcctcaaggacctggtgtccaggactgtaggcccctgaagccaggccttgtcagctttgcatcctgcaacgggagcctgagcaagggatggagggaggaggggccagaactcctgggttctggcctcctcctccgcgattcaggtttaaccccttcgggctccagagcggctgcgctggggtgggggcggagtctgtctccgcggcaacaaggcagaaagaatcccgggggacccaggtcgccatagcaacgggagcgctggggcgcccccgccctacgggagctgtttcccagggaacggtgcctccatggaggcggtgtgcggtgcttgggggagggggctggtgctgggggtctcggtcctagggagcaaagaaccaggggaccctcatgccaacgccccccgagccctcactgtcctttccacttccatccaggccccggggtcggcccaggtggctggactatgcgggcgcctaacccttcaccgggacctgcgcaccggccgctgggaaccagacccacagcgctctcgacgctgtctccgggacccgcagcgcgtgctggagtactgcagacaggtgggcggggccgaacgggagaggcggggccgcccatagaaagctagacttgaaaaaggcgtggtccagggtgctgcgcgatctaaggcgtggaggctggggggcgtggccaataaagaggcgcaactatgctaggggcaggggacctgttttgagatactaagtcaggaaaaggggagagccgcgagatagccagagaggaagtggaatttaggaatctggtggtctttgtaaagagtagaggtgtaggggggagtggcgaaaggataggcggggctaagacagaaagagaccttaaggaccagcaagatggggaaaggggtggagcccaatgagagcgcggagagctgggggggcgtggccatgaaaagacaaatttataacgggaagggagagttttggagaggcggaatagaggaaaaggcggggcctaaaggagggtgagacctttggggagacgaatctgactgcggggaggggtgaccagagaggtgggcttagagggaccttcagaaagaaacagcacaggaaaagagatagggcttaaagatgacgggacttttaagggaaaactgctagtgggcgtggccaatgagcacaaggagcttggatatctaaggctggtgctagggagaagcagggcctagggaagcgatgtcctcatgaatactagagccttgaaaacggacctggccgggcgcggtggctcacgcctgtaatcgcagcacttggggaggccgaggcaggcggatcacctgaggtcagaagttcgagaccagcctggccaacacggcgaaactccgtctctactaaaaatacaaaaattagcctggcatggtggtgcgtgcctgtaatcccagctactcaggaggctgagacaggagaatcgcttgaacctgggaggaggaggttgcagtgagccgagattgtaccattccactccagcctgggcgacaagagcaaatctccgtctcaaagaaagaaagaaagagggagaaagaaagagaaaagggacctgactactggagaggggtggctggcaggggcggggcagtgggctgattgcccccatctgatccccccagatgtacccggagctgcagattgcacgtgtggagcaggctacgcaggccatccccatggagcgctggtgcgggggttcccggagcggcagctgcgcccacccccaccaccaggttgtgcccttccgctgcctgcgtgagtcccaggcggggagaggggaactgaggtgggagtttctgaggggcaaggttctgagcccctctctcaggcctacattaaggggctgggtgcttgtgtcctaagtggggcagagaagcctctgaggataaaatatctggattctgaggagggtggggttggtggctataggaggatctcaccctggtgtcccgtgcttccccagctggtgaatttgtgagtgaggccctgctggtgcctgaaggctgccggttcttgcaccaggagcgcatggaccaatgtgagagttcaacccggaggcatcaggaggcacaggaggtcaggacgttggcccacccgtccccagcccccacaacccaggaactgggacctctaacaccctccgccaccagaaccgaggagtctgggccaccagcatcctcttcgcacttgggatctaagaatttcatcccccaaccccttcctctagaagcaggaatccaggctcccagcctcatcaacccccaaccctggcagcccagttccccatctaccccctcccatcccacaatcctggcatctgggcccactcttcctacaggcctgcagctcccagggcctcatcctgcacggctcgggcatgctcttaccctgtggctcggatcggttccgtggtgtggagtatgtgtgctgtccccctccagggacccccgacccatctgggacagcagttgggtgagtgggagggaaccctccatgcccatctcaaggttcctgaggcaggggatggaagcctgggagcccaggcctgggttcttactgcctgggtcctctcctgctccctcagtgacccctccacccggtcctggcccccggggagcagagtagagggggctgaggacgaggaagaggaggaatccttcccacagccagtagatgattacttcgtggagcctccgcaggctgaagaggaagaggaaacggtcccacccccaagctcccatacacttgcagtggtcggcaaaggtgaggcagtctctgaacccctggggcctctccaccatagagggagaaagatctgggggagtcttgctggggggtgtctttgggaggggcctataggggaaaggcccaactgaggagaaaagacgagagtatctttggataaaatagaagtagaagggctaacctgccaagggagggggtggtttgggggtacttgggagtagaggggccattgggtaggtcttgaggatcatttcaggaaagcttggaagatggtgtaatggattcctaagctttgcaagaacaggcccagtccagaactacatctcccataatgccaggcagcagcggtggctaaactgggtgcatgatggtctccagtgcactctaggaaatgtggttctctaggtagaaaaggcgacctggaggtgggctgcagactgacctcctgatccctggtcttgcagtcactcccaccccgaggcccacagacggtgtggatatttactttggcatgcctggggaaatcagtgagcacgaggggttcctgagggccaagatggacctggaggagcgtaggatgcgccagattaatgaggtgataatactgggggccccaggaccccctacagtacagagctccctaaataccaggaaattcctccaggacacattgatactacctccaaaggctccctaagcccctttgaccttgagctctcaacaccaccccctaagatggccagagatccatggcccttctagaatcccactgagacgctaccaggttctctggaaactctggtctatggtactctttcactttattggtttttttttttttcttttgttgttgttgttgtgacggagtttcgctcttaacacccaggctggagtgcaatggtgcgatctcggcccactgcaacctctgcctcccgggctccagcgattccccttcctcagtctcctgagtagctgggattacaggcacccaccaccacgcccggctaatttttgtatttttagtagagacagggtttcaccatgttggccaggatggtcttgaactcccggcgggaggagatccacccgcctcggcctcccaaagtgctgggattacaggcatgagccaccacgcctggcctctctttcactttaaactccttctggatcttccctcttgggaacccaggagccagcgagacttaagggatctggggcctttaaatctttttttttttttttttttgagacagagtttcgctctgttgcccaggctagagtgcagtgacgtgatctcccactcactgcaagctccacctcctgggttcacgccattctcctgcctcagcctcccgagtagctgggactactggtacccaccacagcgcccagataattttttctgttttcagtagagacagggtttcaccatgttagccaggatggcctcaatctcctgaccttgtgatccacccacctcggcctcccaaagtgctgggattacaggcatgagccactgcgcccagccatggggcttctaaaatcttaaagaggggttgggggacttgccaggtggatcagggtggattctgggatcctgaagctcccctccctatgcaggtgatgcgtgaatgggccatggcagacaaccagtccaagaacctgcctaaagccgacagacaggccctgaatgaggtaggacagccccagtgggtcctactcatgcctgtccaccacctggagcacactcagtttcacctggctctggctgtgccctgcccatccagttccaccccttcccacctatctcagcctttcctggccccatgcctacatgcagctctgcccctcttagccgtcatctgacctgacactgctctcctccccagattggccatattcggccccatctacagacttgacttgcctctcagggctggctctggagtcctgtcccaagccagggcctctgcagatgcagccagggccttcttggtctctctttgatgcatttatgtctctatcaggccccgccccctgattctggctctgctgggccaatctcacctttattaacctgacctaccccatggagaccccactcatgttagcccccattccagctctttgtcccacccctatcgtgtcatttatacacagcctgtctccagtttgaccctgcccaggccaggagccctgcaaggctttgtccctttcaccttaacattggtcagttctgctcccagattgctcccactcaatcttacagtttacatcctcacattggctcccagtgggcctagtcccacctccactctgcctggccctgtagcccaccccttccagtccataacctttggttctgcccaggcctggacccctggaacgccccccaaccccatgtagccctgcctttccaggctctctttgaccaggctttgacccatcttctcctctcctgaccctgtgcccacccgctccccagcacttccagtccattctgcagactctggaggagcaggtgtctggtgagcgacagcgcctggtggaaacccacgccacccgcgtcatcgcccttatcaacgaccagcgccgggctgccttggagggcttcctggcagccctgcaggcagatccgcctcaggtgcggggaccgtgggggcagagagcagagggtgagaagggtcagggcgggcttgggcatcctgtgtcccttccacaggcggagcgtgtcctgttggccctgcggcgctacctgcgtgcggagcagaaggaacagaggcacacgctgcgccactaccagcatgtggccgccgtggatcccgagaaggcacagcagatgcgcttccaggtgctcacatccttccagctcccaaatgcgccgctattcctcagacgcccgcgcctcaggctcttctcttgtcccttagaccctctttctgtctcttggaccccttcctatcccctgaacaccgcttctctgccccttcccagtctctcagctcagcttcctgaccctgaaacatggaccctcacatgctgtgtctttgacccctgcttcttggcccttggattcctactccccccgccgtcgatcctatgttctgtcccttggattttcactgcctttcccagaatcgtcttttttttttttttttttttgagacaggttcttgctctgtcgcccaggcaggagagcagtgtgcgatcttggctcattgcaacttccacctcctgggttcaagcaattctcctgcctcagcctctcgagtagctgggattacaggagcctgccaccacactgggctaatttttttttttttttttgacagagtctcgctctgtttcccaggctggagtgcagtgacatgatctgggctcactgcaacctccgcctactgggttcaagctattctcctgcctcagcctcctgagtagctgggactacaggcgggtgtcaccacatctggctgatttttgtatttttagtagagacagggtttcaccatactggtcaggctggtcttgaactcgacctcaggtgatccacccttggcctcctaaagtactcggattacaggtgtgagccaccacgcccggccccagctaatttttgtatttttggtagacacgggtttcagcatg[137 bp omitted]cagagacagggttttgccatg[137 bp omitted]gagacagggttttgccatgttgcccaggctagtctcaaactcctgacctcaggtgatctgcctacctcggcctcccaaagtgctgggattacaggcatgagccaccgcgcccggtcgagaatctccttcttgttccttgaaccctcttcctgtccctcaacctcctttctccataacttcacttgttttccctggaacccctgttctgtgcgctcaaatttgaattcccctttcctggatgttttcttcctgtctatgaaactccattctgtgctcttgaactccaaatcttgccttgaaccatgtcatttctatatgaccctccaatcctcaatctctgtctctggaatcccctcaaaccccactttctgttccttggactttattcttcaatttccttctcctatggcccagttcctaacccttgtaccacacatcctgtccattgcatgtgccgcttttcctcagtcgctattgaattcctccttcatactgcttcagtttcctcatctccagcctgcattgcgcagttcatccttcatgtccactcacccacaggtgcatacccaccttcaagtgattgaggagagggtgaatcagagcctgggcctgcttgaccagaacccccacctggctcaggagctgcggccccaaatccgtgagtgtctattaccctggctcccattacagatctctgagggcagatcttgactcctaaatgttgggcccccccaatttcatttattcctctataacaaacagcccagaccttagcagtgaaaatcaacaatgatttttctttgttcatgattctgccatccggtctgcgctcagcagagtggttctttcagtggtcttgccagtggtcaagcatgcagctgtatttagctagcagatcatctaggggctgggagtctagcacaaatggacctttctctctctccaaggaagcgcaaggcctctcttctccgtggagcttctccatgtggtctcatcagcagggtagctagattccctacatggtggtttatgctctctaagacatcacagtggaagttgctaggtcttaaggcttgggcccacattctatttgttaaagcaagttacaaattcagtccagattcaagggaaggaacctatatgcataccggaaagtgtgacctattgcagcccccacatctattgtgtctttctcctggatatctcacacataaccctgattctcctagtatttaagaaagctatcatcttgaggcgcggtggctcacgcctataatcccagcactttaggaggccgaggcgggtggatcacttgaggtcaggagttcgagaccagcctggccaacatggtgaaaccccgtctttactaaaaatacaaaaatcagccgggcatgatgtcgcttgcctgtaatcccagctacttaggaggctgaggcaagagaattgcttgaacccgggaggtggaggttgcagtgagctgagatcgcatcattgcactccagctgggcaacaagagtgagactctgtctcaaaaaaaaaaaaacaaaaaaaaaacataatcttgaaacttcagcctccatccttcctgccagcagtgcctccatccagcttcccactttctcagatcacacttctggctaccccacacttggggctgactctgctgtctgcatgatctcccacttgctctactggtagggtgccctccactcacccctatgctcactacctcagccacctttctgcatgtccccctcagaggaactcctccactctgaacacctgggtcccagtgaattggaagcccctgcccctgggggcagcagcgaggacaagggtgggctgcagcctccagattccaaggatggtgagtgagcccacatatagatgaccccagacattagggaacaggccccagcctaatttgtaatcccctagagtctgagggtgtcttcaccaccacagtgactgggagaggatgaggaggaacgtctaaggttgcaggggcctctgtaggatccccaatcctccttcttagtccctggaaggatgtttctccacctttctttgctgataccctcctctcttcactgttccactcccttgcttcctctggctgccagcagacacccccatgacccttccaaaaggtgagtgtctcacagttaaccccagcctccaaatcccactgaatccctgaacccagaaggaaacagggtccatccattgggaacctcagaccccctggggtagagtttgatgtactttccagccccctcctctggaccctaaagaatgagatagggccaggcgctggtgactcacacccgtaatcctagcactttcagaggctgaggcaggaggatcccttgaggccacgagttctagaccagcctgggcaacataatgagaccctgtacctacaaataatttaaaaattacctgggtgtggtggggcatgtctgtagtcccagctgctcaggaggctgacgtagaaggatcactggagcccaggaagttgaggctgcagtgagctgagatcatgccactgcactccagcctgggtgacagagtgagactctgtctaaagaaaaaaaaaaagaatgagatcagacttgggggtagggtccacagaacaagatgctgcatcccctgagaaagagaagatgaacccgctggaacagtatgagcgaaaggtaagttagtcagaactgtgggctccctaaggggaacaagatcggggcctatatggctgggtacgagggaggagatgctgggggcttggattccttgtcctgagggaagagggagctgaggacgtggaattgagatcctagaaaatgagagggctgggggacgctctcttgggcccttgggtaggaagaagccagtgccaggcttctgggttcctgacacctcctgctcccccaggtgaatgcgtctgttccaaggggtttccctttccactcatcggagattcagagggatgagctggtaagaggaggaacagccgggtacctaggggaagagaccagaggtcagcggccaggctgtgattcccaaagccacacaggaccctcaaagaagccctctgccccatctcctctccctgcaggcaccagctgggacaggggtgtcccgtgaggctgtgtcgggtctgctgatcatgggagcgggcggaggctccctcatcgtcctctccatgctgctcctgcgcaggaagaagccctacggggctatcagccatggcgtggtggaggtgagaaccatggcgtggtggaggtgtgggaagagttcctgagcccgggtgtgggcggcctgagagacttgcgggcagtcccgcccccgcaccacactgtcctttccctcccctgctcgttgcaggtggaccccatgctgaccctggaggagcagcagctccgcgaactgcagcggcacggctatgagaaccccacttaccgcttcctggaggaacgaccctgacccggcccccttcaccccttcagccgagcccagacctcccctcttcctggagccccagaaccccaactcccagcctagggcagcagggagtcttgaagtgatcatttcacacccttttgtgagacggctggaaattcttatttcccctttccaattccaaaattccatccctaagaattcccagatagtcccagcagcctccccacgtggcacctcctcaccttaatttattttttaagtttatttatggctctttaaggtgaccgccaccttggtcctagtgtctattccctggaattcaccctctcatgtttccctactaacatcccaataaagtcctcttccctaccaggccagtctgagtctctgtgggagaattagtctgtaaccacagctggacgcggtgtcatcgccgcccaggccgccttggcctctttaaacgggatgacggagctttaaatctgggcgggtcctgcgggaagggctggcgcgccgggggcggggctcagaggccagggataggcgcctgtcctggagctgtccgcggtgctgaactggccgcgccttccaactgtcagttgggtaccagtgtggaccccaaggaggctgggctccagcgagtttcccctgccatctgttcagcctcacacacaatcacatgcagcgcccaccccaatcttcgagagtcctgtaagagattatgaatcgtgaaccaccgttcccattccccaaagtcttcattccttctcggggagtctatagaaaccctcctggagtgtggaaattccagtcacgtgtcccagaaagggatatatgatatctgcacgtgcctactgaacttcgttttattttctccccctactgcccgtataaatgcagaagaatttctttttctttcttttctttccccacctccctttttttaagacagggtctaacactgtcacttaggctggagtgcagtggtgcaatcatagcttactgcagcttccaactcttgggcttaagtgaccctcctgcctcagcctcccgagtagctggaactataggcacgtaccgccacccccggataatttttttaaaaaaattttaggccaggtgcggtggctcacgcctgtaatctcagcactttgggaggctgaggcgggcggatcacctgaggtcaggagttcgagaccagcctggccaacatgatgaaaccctatctctactaaaaatacaaaattagccgggcctggtggcgtatgcctgtaatcccagctacttgggggctgaggcagaagaatcgcttgaacccaggaggcggaggttgcagtgagccaagattgcgccactgcactccagcctgagcaacaagagcgaaactccatctcaaaaaaaaaaaaatttagagatggggtcttgctatgttgcccaggctgctctccaagtcctggcctcaagtgatcctcccacctcagcctcctgagtagctgggattacaggcgtgcagcactgtgcccagtattggaatttataccctcacatgtcccattatgctggctcgggttagccctctacatatacagttatctgtcccaagagggttaggaggatttaaagggttaatattcgtggagctgttataactgcacctgccacttagcaagtatttgttaaataaattttaaagtattaaggtagcaaacactcatatggtgttcaccctgtgccaggcactactctgagggctttacatgcactggcacacttaaccattactcctgtgaaaggaaaataaatcctgggggccccaaatcactaagttaaagggaaaagtcaagctgggaactgcttagggcaaacctgcctccctttctattcaaggtcatccctgtactcactgagagaggcatattctgattgcctcctttggaaaagctaaccagaaactcaaaaggatgcaaccatttgtctctcacctacctgtgacctggaagccccctccctgctttgtgttgtcctgcctttccagacagaaccaatgtacatcttaacatatgttgattgatgtctcatatctccctgaaatgtataaaaccaagttgtaccccgaacaccttgggcacatgtcgtcaggaccttctaaggctgtgtcatgggtgcatatcctcaaccttggcaaaataaactttctgaattaattgagacctgactcagatattcggagttcacatttccatctaatggagtcagtattatgactattcctatctatagattaggaactgaggctgagagtcgttacatcacatgctctatgtcatcatccaggaaaagtcagagctaagaattcaatccaagaagcctggctccagcatccactctcctggccactttgctaacctgtttaatactccaaggttgtccaatatggtgctccgattgtgcgcttcaaaattccacgtggctgggcacagtggcacgctgctctagtcccagctacccgggaggctgaggcaagaggattgcttgagcccagggcttctggactggagtgcactgtgccacttgggtgtccacactaagtttggcatcaatatgatgacctcctgggaatgggaaccgacctaggaaacataggtcaacactctcatgctgatcagtagtgggatagcacctgtgaatagccactgcgcttcagcctgggcaacatagagggaccctgtctaaaaataaaaataaaaataaaaaataaataaataaataaataaataaataaataaataaaatccaagtgataccattcacctcccagactttgtagatttgcttttttaccacagcttcccaggagatggcagtaaagtgtcatgttctaatgtcagtatcttgcatgattttctgacagatggtttggggagggagcatctatttctaattctcccaaagggcctatgagctagctgtggttcttcataatatataactgtaaatataggtcgtgtatattgaatatacacctggtagatgttaggagaagacgcttcatggtgcaagttggatgcaatgccagtctctgtagagaactcagtttgcaccatcactctgataccggttatatctttggttatactcggatgagcccagtggaaatctatcactaacgccacaggcaccacaggggttgaaagccgcctttgtattttcacaaccaagagtgatcaacaggctaacaacaggtaaggagctccaagcaggtgaaacaggaaaagtaaggcggttttgctcaatagggtcagtgtgtaaagtaaagtttaatggtaatacttagagtatttaattttaaaatgttgttattcaaattccagcaggaaaaataattttgctgttatttatctgatgttcttgcactcctaagtcattcttttcccactgaagatgatcttggtaatactgtttttttgttttgttttgttttggttttgggtttttgagacagagtcttgtcaggctggagtgcagtggtgtgatcttggctcatagcaacctccacttcccaggttcaaatggttctcccacctcagcctcccgagtaactgggattacaggcgcccgccaccatgcctggctaatttttgtatttttaatagagacggggtttcaccatgttggccaggctggtcttaaactcctgacctcaaatgatccacctgccttggccttccaaagtgttgggattacaggcgtgagccaccgggtccggccaatttttcttataataattcagtttctaccatgtgcgtggctcatgcctgtaatcccagcaatttgtgagactgaggtggaaggatcgcttgagtctaggagctcaagaccagtctgggcaacatagtgagacacagtctttacaaaaaaaaaattagtcaggcatggtgatgagtgcctgtagttccagctactcgggaggctgaagtgggagaattgtttgagcctaagaggtcgaggctgtagagagccaaagaagacagattgagacccggtctcaaaataataataataataataatatatggacaggtgcagaagctcatgcatgtaatcccagcactttgggaggccgaggtgggagtatcccttgagcccaggagttcgagaccagcctgggcaacatagtgagaccctgtatctacaaaaatagaaacgaaaaaattagctgggtgtggtggcatacacctgtggtcctagcttctcaagaggctgaggcagaaggatctcttgagtccaggcaggaggtggaggctgcagtgagctgacattgcaccactgtactccagcctgagcaagagtgagaccctgttcttatttaaaaaaaaaaaaaaaaaaaaacacacaaagtttctgagggacattttatcatgttagtggggtgggtgtgtgcacatgtgtgtattgatatgcatcttagtctgggctaagaataccatgagctgggtggcttaaacaacacacatttatttctcacaagtgctagaggctgagaagtccaagatcaaggtgccagcagctccaaagtctggaggactctcttcctggtttgcagatggtttgttttgttttgttttttgacaaggtcttgttctgtcacctggctggagtgcactggtgcaatcacagctcactgcagccttgatctcccaggctgaggcaattctcctgccttactctctcgagtagctgggaccacaggtgtgcaccactacacctggctattttgttttttttgagtagagacaggatttcaccatgctgcccacgctgttctcaaactcctgagctcaagctatcctcccatcctggcctcccaaaatgctgggattacaggtgtgagccagtgtgccctgcccaagatggccatcctcttactgcatcttcatatggcagagagtagagagcagagaagcaagctctctcctgtctccttcttttttttttttttttgagatggagtttcactcttgttgcccaggatggagtgcaatggcatgatctcgggtcaccgcaatctccacctcccaggttcaagtgattctcctgcctcagcctcctgagtagctgggattacaggcatgcaccaccatgcctggctaatatgtattttttagtagagacggggtttctccatgttggtcaggctggtctcgaactccagacctcagatgatccacccgcctcggcctcccaaagtgctgggattacaggcatgagccaccacgcccggactctcccatctcttctaacaaggacattagtcccattcatgagggctccaccctcatgacctaactacctcccaaaggcccatcttcaaatactaccccactggggcttatggtttcaacaaatgaattttagagggacacaaacatgcactccataacaatacaaattgagatatacatcttatatgtcaacaaaacctcagatgccatcagtgataaaaaatagcattattttaggtaccacaaaaggaaaaaaaaggcaaaatataaactatgtcacacaattgactataagatgatcccaattaagttcttctgtattttttattttattattattatttatttacttactttagagacagtgtcttgctgcctcccacgctggagtgcagtgctgcaatcatggttcactgcggcatcaaactcctggcctcaagtgatcctcctgcctcagcctccaaagtagctgggactacaggcacccgccaccatgcccagctaatttttgtatttttagtagagacagggtttcaccatgttgaccaggctggtctccaactcctgacctcaagtaatccgccctccttggcctcccaaattgctgggattacaggagtgaggcacctcgcccagtccccagataactctgtctcccaatattgagacccttgtgtaatgcctcccacactgatctgggatcaatgacatgtcaacaagtatgatacaagcagggacttgtctccttggatctctctttcttggaaccactgagccaccacctgaagttaagagatccacctgccctcctggactgcatggaaagactcttgggccactcctggaagctccattatctcagctgagctatcaggcatgtgagtgaaggtgttgtggatttccaggccagttgggcctcaggttgattgcagccacatgaggaaccaaagggagacagcagaacagccagctgaacccggcgtagatttcagtcagaaacaattaagaggggctgggcgcggtagctcacacctgtaatcccagcactttggtaggccgaggtgggtggatcacttgaggtcaggagttcgagacaagcctggccaacatgctggaaccccaatctctactaaacaaatacaaaaattagctagacgtggtggtgggtgcctgtaatcccagctacttgggaggcagaggcaggagagtcgcttgaacctggaaggcggaggttgcagtgagcagagatcgcgccactgcactccaatctggtgagactgagactccttctcaaaaaagaaaaaagaaaagaaataattaaaagggtgttggtttaagccttaagttttggggtggagacattggctggagccccggaatgtgctaacatgtacattcggtctgtggtccatgaaaggttcctagctatgggggctgtgatgggtccaagggctttctgggatgggggctctttgtgtgattatattgcagaggccagagcagaggctgtggagcgggtatgagaatggggtttgggtttttttttttttttgagacggaattttgttttgttgcccagggtggagaaaagtggtgggattttaggttaatggaagttccgcctcctggatttaaggaattttcctgctttagcctcccaagtaggtgggaaaacaggtgcccgccaccatgcctagctaattttttttttttttggtttgtatttttagtagagatagggtttcaccgtgttagccaggatggtctcaatctcctgaccgcatgatccgcccgcctcggcctcccaaaatgctgggattacaggtgtgagtcactgcgcctggccaatttttttgtatttttagtagagacaaggtttcatcatgttggccaggctggtctcaaactcccgacctcaggtagtccacccgcctccgcctcccaaagtgcagggattataggcataagccactgcgcccagccttgggggtttttttgtatctttttttgagacagagtcttgctctgtcgcccaggttggagtgcagtggcgcaatctcagctcactgcaacctctgcctcccaggttcaagcgagtctcatgcttcagccttctgagtagctgggattacaggcgcacgccaccacgcctggctaatttttgtatttttagtagagatgggtttttgccatgttggccaggctggtctcaaactcctgacctcaggtgatctgctcgcctcggcctcacaaagtgctgcaattttaagtgtgagtcactgcgcctggctgagaatggggttttgtggaattcttagtttgggtttctccaaaagcagctatggagggaaggattggagggaaagttcatttggaagggatggagaacattggtaggggagacaggaagagacacagagaagaaagagcagccaataaagggtattttatcaagcccagaccactgtggggaactggggattcatctgctggggaactctggagcccgcataggccatgcacttccaagttagcccaacagacaggtgggggactatctcctatcagtaactggctgagggctgctggagtgggaagtggacacgaaccccctggctttcaacacttgccatgctcatacctggggcagagccgcaccagtggtttgagattgcccaaaggcaaatattctggggctgacacccaggctggtctcaaactcctggcctcaagtgatcctcacaccttggcctcctaaaggccagtccctcttgtgtcgccagggtgagggtgacaggatatggacttggcacccatggtggctgctacatcctcccccctcaggcacattcatcccaatatgacccctcagcgggcatcacagccactcccctgcaccagtgcccccagagatcagacaacagtggttctagtccaaattgagtttaaatttttttttttttttttttttgagacagagtctctctttgtcacctaggctggagtgcagtggcacaatctcggctcactgcaacctccgcctcctgggttcaatcaattcttctgcctcagcctcccaagtagctgggactacaggcgcatgccaccatgtccagccaattgtttttgtatttttagtggagacagggtttcaccatgttggccaggctggtctcaaactcctcacctcaagtgatccgcccgcctcggcctcccagagtgttaggattacaggcatgagccaccaaatctggcccaaattgagtttaataaagagcttgagtgatgctcagattagggagggagtgaccgggaatgctggggtctggaactgggggcccagctgagctctgaatcagagagcagtgagacctaagggtccctgatctcagagggtccctcctgtctcagggtgaggacctgaagggtgtgggtcccggggagggtgaggaggccattgtaggagatttactgagatggtatcgggatgccccaagcaccacgtagggggattacatctgggtttctgggaacgaagagctgagttaggggagagaacccgaaagatctcagtggggaaaggactaggggtgcagggtgtttcacagaaacaatcaaggggcctcgatttcacagaaatcatcaagagggctccttgtgggtagaagaggggtatcacagcaccccaaatattggggcctgttcacccctctgcagccattctggggttttaatgtaaaaccccaatggcaggatattccacatacattatcatgggtttgcaacattagcatacgctggctgtcccgcaggacggtggggactggaaaatcagtccagggtctgggtttgagtcctaagaggacaggcctggcggcgccacacggctcctcttcaacagctgccggagctgtagacaaggcaaaggagggagagaagtctgtcaggttggaaggagaggtggggaaggcacgccatgcagagggaggggctagagaagagaggttgagtgggtccctttggatttgaagatcagaggtccagagtcaagattttggaagagccaggtgcagtggctcacgcctgtaatcccagcactttgtggggctaaggtgggcaaatcacctgaggtcaggagttcaagaccagcccagccaacatggcgaaaccccgcctctaccagagatacaaaaattagccgggcatggtggcacgtgtgcctttagtcccagcttgggaggctgaggtgggagaatcacttgaacctgggaggtggagcttgcggtgagctaaaattgcaccactgcactccagcctgggtgacaaagcaagactccgcctccaaaaaaaaaaaaaagatttgggaaggaggccgggagtgatggttcctgtgatcccaacactttgggaggccaaggcgggaggatcaattgaggccaggagtttgagatcaacctggacaacatagtgtgaccccatctcttaaaaaaaaaaaaaaacaaaattagctgggtgtggtggtgactgcctgtagtaccagctactggagaggctgaggtgggaggatcccttgagcccaggagctcgaggctgcagtgagctatgatcatgccactgcactccagcctaggcaacagagcaagacgctgcctcaaaataaataaataaacaaacaaacaaataaaaataaagatgtgggaagaaggtcaaggcctgggttcgtacactgagaaagggtcaggaagcagaacttcagtgaagggaaaggggctgctggctgggggttcccacctgggggtgaggaatgagagggaattgaagggaacaggtaagaggtcaaaggtcacatctgaggtcaggacccaaggttaggggcagggggtaggaggtcacacttggggggatcaaaggtcacaccttgaggtcaagcaagattcagggttggaagtacaggtcacactgtgaggtcagggttggggtagagatcagagaagtcaccattctggggtaaaggatgaaacactgaggtcagaggtcacattatagagtcagggttgcctgagggctgaagtcaccttccgagattagaagtcattctctgaaagcgagcattgggtggggcagggaggtcatcccgcgcccgcgagctcagaggccactctacaggcaggctcagtgcttacttaccccctcagggcccggcccgggccgcagcaggtgaacgggctgctcattctccaggttgcgcagtgtggggtccgccccagctgccaacaggtgccgcacgatggcctcctgggccggcccagggggcagggcagccgccatgtggagggctgtgttcccgtgggcctggaaaagtaaggggagggctggtggggatctgggctcagctggcccaggcctctaaactgcacttcaatttctgccttgtctacgtcctacacttgtcctttcacatcccagacctcccccggccacagccacgctgcatgcatccctgtgtccacggactacatgttctggggcaatctgtgtctgcttcctatactttcccctgcagatcccacacatcgtcccctccacgtccacagcccccaggacccctaacatcccactgccccccctaccgtaccccacacaatctgcacttcccagccccagctcccaccttcatgttgacaaaggtccgcaggtctccccggggcagctccagcagcagctgaaccagagtggggttggcagcctgcacggccaagtgcagaactgtcttgttgctcttgatctcctgaggggaagggaatggcagaggtcagggccagcctcacacctaggtgccctcccacagaatccaggagtctttaaagaccctgacccttggcggagtgcggtggttcacgcctgtaatcctagcactttgggaagctgaagaaggaggatcacttgaggccaggagctgcagaccagcctggacaacacagcaagacctcatctctacaaaaaatagaaaaattagccaggcgtggtggtgcgcacctgtagtcccagctgcttgggaggctgaggcaggaggttcatttgagcctaggagttcacggctgcagtgggccatgaccacaccactgcactccagcatgggtgacagagtgacactctatctcaaaattaataaataaataaataagatgctggccctcttctgcgagccccaccaagagtgccttattcagttgtatgtcttgtgcaccgcacaacaccacgtctcagggtgtaccattcacaccatacaccttccagaactgtacatttctcatgacaattttcccaccagtgtctgagaaagagactccttttccagttcttcaaagcaactgccttggctacctgccctccattcaacacattaaattgcatcccgacccacacagactgtactttatctacaagcacaggagttggcagcattaatcagtggactagctaatattgcaatactgcaccacaatattgagctgttcccatcatatttgggggaaaataaaagacattttctaaaatgaaacctttttatgtgtctttaaggagtttgtaacgataatgaatgttaaacattttatgtgctgataacagggcaaaaccacctagtttgctcgtccaaaaaatgatgaagacaaaaccaaagctctagattaagagtgatttgaaaagacgtaacatcataatatgtgtgcttatttggatcttgattttttttaatgaaaaaaattatcattttacagccaaaaggaaatttgaatacagccaggatatttggtattacaagaaaatctttaattttttaaagacagagcaatgatactgaggtttaaaaagttcttttttttcgaagggcacaggggctcatgcctgtaatcccagcactttgggaggccaaggagggcggatcacttgaggtcaagagttcgagaccagcctggccaacatggtgaaaccgtctctactaaaaatacaaaaattagccaggcgtggtggcacatgcctataatcccagctacttgggaggctgagacacaggaatagcttgaacccgggaggcagaggttgcagtgagccaaaatcacaccattgcaatccagcctgggcaacagagtgagactccgtctcaaaaaaaaaaagctatgttttttgtttgttttttgagacagggtctcgctctgttgcccaggctggagtgcagtggtgtgaccaaggctcactgtagcctcaacctactgggctcgagtgatcctcccaccttagcctccccaagcactgggattacagggaaagagttcttatcttttattattgttgttgttgttgttgagagacagggtcttgctctgtcacccaggctggagtgtggtggcaaaatcatggctcactgcagccttgacctccccaggttcaggtgatcctcccacctcagcctcctgagtacctgggaccacaggcatgtgccatcaagcccagctaatttttgtattttttttagagatggggtctccctatgttgcccaggttggtctcgaattcctgagctcgagcagtccgcccacctgagcctcccaaagtgcttggattacaggcatgagccaccgcacccagccatctttcttatttttaaaaaacttattattattactaaaaatacaaaaattagtggggtgtgatagcacatgcctatagtcccagctactcgggaggctgaggcaggagaatcacttgaacctgggaggttgcagtgaaccaagactgtgccactgcactccaacctgggcgacagagcgagactccatctcaaaaaaaaaaaaaaaattatttgtccttttttcagagaaatactccctgatttctgagttctcccagaaccctaccacacagttaattcttcctcttcatcatttcttgctcaacttaaatgtaatttcctcagaatgaccttcattgtgagccccgcatccaatataaagccaatctttttattgtctaagagctccttctacattcccaaggcagctctcatcccaatttgtaattatgttcagttctttgtttacttatcatctcctctcttttccattaaattttaatgtctaaaagtacaagaaagtggtcttttcttattaaaacattataggtagctgggcacagcagctcacgcctgtaatcccagcacttgggaggccaaggctgggggatcacttgggcccaggagttcgagaccagcctgggcaacatagtgagaccccccctctctacaaaaaatataaaacaattagccgggtgaggtggctcatgcctgtagtcccagctacttaggaggctgaggtggaaggaatgtttgaggtcaggaagtcgaggctgcagtgattcgtgatcgcaccacagcactccagcctgggtgacaaagccagactctgtctctaaaaaacaaacaaacaaaaagcaactttatgccccatcactagcacactggtagctacatcatatgtgtccaaaattctgagtgaagaaacgaatgaattaccaaagtatcaatttcaccttctctgtattgcccaaatgatcacttagctctactttgcaaccattaagagcctagattaccatcattcatttcctaaccccgctaataatgccttatcttgtctctactcagtcatgcccgtccttcttacagtccatccccaccatctagctaattctgctaaacaccattattctttaaagatacacaaatatttttgaaaaaaat[136 bp omitted]cggtgaaactgcgtctctactaaaaatgcaaaaatttagccgggcgtggtggcgggtgcctatagtcccagctactcaggaggctgaggcaggagaatggtgtgaacccgggaggcggagcttacagtgagccgagatcgcaccactgcactccagcctgggtgacagagcgagagccatctcaaaaaaaaaaaaaaaatcacttgaaagtgagagagtggatggggcaggactggccatgagtggctggttattgatgttggacatatggagttcattccactattttctatattttattggtgttcaacattctttaactaaaaaaacatttttcggctgggcgcagtggcttatgcctgtaatcccagcactttgggaggccaaggcgggcggctcacctgaggtcaggagtttgagagaacagcctggccaacatagggaaaccccgtctccattaaaaatacaaaaaaattagccaagcgtggtggtgcatgcctgtagtcccagttactcaggaggctgaggcaggagcatggcttgaacccgggaggcagaggttgcagtaagccgagatcatgccactgcactccagcctgggtgacagagtgagattccatctcaataaataaataaacattttttgtggatgtttaattctctcagccagcctatgaaggagctactgtcacaggaaaggaacagaacataattaaaagctaggttctaaagtcagactacctgggttctaattctctctctgacagtcacaagctataagatttttcaggctgggtgcagtggctcacaactgtaatcccagcactttcagaggcagaggtggaaggattgcttgagctcaggagtttgagaccaacctggccaacatagttagaccccaccttacaaaaaagttgccacgcatggtggtgcatgcctgtgatcacagctacttgggaggctgaggtgggaggatcacttaagtgcacaaggtcaaggctgcaataagctgtgatcatgccactgcactccagcctgagtgacagagtgagaccctgtctcaaagagatttttgaggccaggtgcagtggctcacgcttgcaatcccagcattttgggaagccgaggcaggaagatcacctgaggtcgggagttcgagaccagcctgaccaacatggagaaaccctgtctctactaaaaatacaaaattagctggacgtggtggtgggaacctgtaatcccagttactcgggaggctgaggcaggagaatcgcttgaacccaggaggcggaggttgtggtgagccgagatcacaccattgcactccagcctgggcaacaagagcaaaactccatctcaaaaagaaaaaaaaaaagatttttgatttcccatgcctgtttccttttcagtaaaatagagaaaatagagtacacatgtcaaagggtgtttgtgaggtttcaataagctaatctatgaaactcagtgcttgatgaatgaatagtaagtgcttgataacataccctaaggtcagtaatattattcccagttaacaactaggggccaggcacagtggctcacgcctgtaatcgcagcactttgggaggccaaggtgggaggatcatttgaggtcaggagtttgagaccagcctggccaacacaatgaaagcccacttctactaaaatacaaaaaaaaaaaaaaaaaaatagccaggcatggtggcgtgcgcctatagtcccagctactcaggaggctaagacaggagaatcacttgaacctgggaggcagagtttgccatgagatgagattgcaccactgcactctagcctgggcgacagagtgagaccctgtctcaaaaacaaaaaaacaaacaaacaaaaaaaccctgctgggcgcggtggctcacgcctgtaatcacagcactttgggaggccaaggcaggtggatcacctgaggtcgggagttcgagaccagcaagaccaatgtggagaaagcctgtctctactaaaaatacaaaaaaattagccaggcgtggtgactcatgcctgtaatcccagctactcaggaggctgaggcaggagaatcacttgaacccgggatgcagaggttgcggtgagccaagatcacaccattgcactccagccagggcaacaagagcaaaactccatctcaaaacaaacaaagaaacaaacaaaaaacccctaaggcacagagaagtgaagtaacatgttcaagggcacgcagcaaggaagaggcaaagtcagcatttgcctggagctcccggacatccaagtggccccattccacacaatctcccagggtctgaccgcccacatccccgctcacctggctggtgtgattagcacccatttgcagcaacatgtggacacaatccagcctgtctcgggcctgtgtgctcagcacccggggacagaggtcggaagggcgcatagcaacgttaagggccaggatggccgtgtggagcggggtgaggcctgcagaatggagacagtgagggacccgcatctgcacccacctcgcccagccacaccaaccacaccagccctgcccacacccaacttaccctcgaagtctctggcttccaggtcaacctggaccccagagttaagcacagcctgggaggaagagaaggcagactgctgggtaagggtatcccctggcctcctggccctggaagccaaaatctgggcaaccagtctaccccccagacaaacccctgcctgccagctggccataccaagagaactcctgggagcccgtaggtagcggccacgtgcaagaccgaacgtccctgatggtcagcggcattgggctctgctcccaggttcaacagatcctccacaatcaggggctggttggcagcagccgccaccaggagaggggtctgcaggccacaggagaagtcaggttgggctcctggttccctcccgtcagaaaaccaggctcccagccccatcccccctcagccccaggagctcaccccccattcccctcttctctaggatccaggggtccaggccccaggctccttcctcccctgaacccaggagagttcaggccccaagcctcaccttgcccttatgctcacgaatgtcaagacgccggtacacctggagcacctcagccgcagcatatgccgcccagcgcagcccccgagccgcaaacaggtgaaggagcctgaggacaggtgggggacagccgtgagaacagcccccaccaagccaagagtctgcagacaaccctatcccttatactcacgtgtccccctcctcatcctgggccagcagctgctgtggccccaaagccagcatgtgagctcgggccacctccagcgatggtccagggaccacagcggggaactgtgggggtcctgaagggggtgcagaaactctccagggtccagcctgtggcagagaagatcctacatagaactgggtgtctggggggtcctggagggtgcaggtggtggggagacccagtcagctgagaattcctccatcccaagccaccacacacacatctgcatgcagagcccctgggtatcccatctatgccaagtgaccttggacctttaggcctcagttttgcccacctggaaaagggtatttttttttttcggtgacagagtcttgctctgtcacccaggctggagtgcagcagtgcaatctctactcactgcaatctctacctcctgggttcaagcaattcccctgcctcagcctcccgagtagctaggattacaggcgtgcgccactacacccagctaatttttttatttttggtttcaccatgttggccaagctggtctcaaacgcctgacctcaagtgatccgcctgcctcagcctcccaaagtgctgggattacaggtgtgagccaccacgcccggcctggaaaagggaatcgtaactgagctccagacatctcagaatactgcaggagtgcaactgcgaatttttaggggcccttcagcatcctgtacccactctgtatctcacctccatgccctggggaaatgggcacggctgccctgggtccgagggtgggtagaagtcaggaggcaggaaattttcggcagcagaagcagggcaagagtaggggctgtcagtgtaggcagcatgcgtgttggggtcccagtctggaaagcccaggctgctaggtccagaacccacagtctccgagtgtgctgggaagggagggtggcctgcgtgtaagaggaggggcaggggcaggtctggttaccagagttggggacgtcacatccagggctagagggcctggcgtctcccaaggtactgagagttagtacttctgggacaccaagctcccgggacctggattcctgggacactgaggaattgagggcctggactcctggggcactaaaaaggctgagcctgggccctggggctccgtaggactatgtgcatagactactggactcaagagaacctaggaaatcagactgctactgagttccagcaagaatgagggcctaccagcctaggcaacatagccagaccccgtttctacaaaaatttaaaaaattagccaagcaaggtggcatcgcctgtggtcccagctacttgggaggctgaggcgggaggatcacttgagcccagaaggttgaggctgcagtgagccagatagcgccactgcactccagtgccagggcaacagagtgagatcctgtctcagaaaaaaaaaaaaaagggaagaatgagggcctgactcccaggtgtcccaaagttctgagagctgcgatgtctgagtcccttagggaagggggatggggaggccgggagctgagagaacttaccagtcacagcctcattcacagatggggtcaggggctgctctgggggagggagaaattgtccctgtagagacaaaagcaaaaaggaacccaggtgactttatctggcagattcctccgggtctgtctcggatctataagacatttcggtcaggaccacccctctcatcagccccgagggcccggcaagccgctgagtccctacgggacagcacggggcctccggagagctgtggctccctggcctcacctgcaccccgccagcgtcgggctgctgctgctggcggcgcctctgctcttccagaagcttcttcacggtttgcgttgggcagtggctgcgctcacccctgctcactgtgcgggagaggagagggggaagtcatcaagggtccttaagtcacctaaatgccgcgggggtggcgcgcggggagtgggtttgggcaccctcctcgccctcccgcgcggaaaaactggcacatagatgccgcctgactcctccaaagccattagaagatttggggtggggcatccgcctccgccgtttccttccttttgctccgcactttccctctgacccaactttccaccaccgtcgcggaaagtgaggaagggggaggagggcacccctctgcagcaaccaccccacttccgtaaaaaaattccacccccagatatccaagttttgaagtcagcgggttggtggggggccggcgccaggcgtcactccctagactcacatccaggttcccaacatttttttccctagaacctgacccggaaatcaggagtccccagcgcccctcctcgagaagtcaaaggcctcaccccgggccgggagcggtggctcacgcctgtaatcccaacactttgagaggccaaggggggcggatcacctgaggtcaggtggccaacatggtgaaaccccgtctctactaaaaatataaaaattagccgggcgtggtggcaggcggctgtatatcccaggtgaggcaggggaaacacttgaacccgggaggcggaggttgaggttgcagtaagcggagatcgcgctactgcactccagcctgggcgacagagagagactccattaaaaaaaaaaaaaaaaaaaaaaaaaggcccatccatacagtctctttttcaggccccaggaatctggaccctcagttccttcctctctaggacctgggagccccagttcccaaactccttcccacgactcagaaagacagaaccctcacccttccgagcctgggttccggcggaggaagggttaagtggggattgcgcggggcgggggcgggaggaggtggctcggaaacagccccgacgcggcgcgctgacgccacggcgctcacgcaagggaatcttccatcctccccttccccccaagtcctgtgccccaggtgtcctgctccgaggcggggcgcgcggccgatcgtggcgctcgtggaatccccgcgcaaggggaattcctgctcagccccgcacgggtggccatccggaaatcccagggcggggcagaggcagggtcaccgccagcgtagaccctgaggccaggctccggacccttccccaccgagacccacgccgattttaagcaaccacgccccccccccccccccccgcactcagcctagtccctgcttctaggggtaggagtctcggttgccagcaacccctagcacctccaaggacccagagatccagcctcccaagcctcccagcccttgcaccctcggggccctgcgatcctggatccccaggcccctgcacccccaggacccagaagtctgggatcccagccgcccctctgtcacgatccacgatcccctcctcctccaaacacctagggccctcactctcgggataaaggactgacgcttcagctccgtccctcagggcctcgggagtctttcgatcctcagtccctcactctcttagggggccgaacgcgtcctgcccgcgcccattacctcggggattccgtggcgtggattgcgggcccccagggccgcggcctcggcgctgcgccagcctcgctgtttcccccgcggagccgccgccgggtccccgatcttgggtccggtacccgcgagtttttaaactaggggttatggcaccgcccagtcctgggcagggcccgcccacaggcctgggagtccccgggtcgcgctccggcgaacgcagtccctgaatgggcgcggcggacttgggaggcggactactcagtccccccgggaaggagggagctggggtccagatctttgctctgaaggagcctagggcaccgggctccaagaggagggagaaaccggggggcctggatttcttttcttttctttttcttttttttcttttcttttttttttttttttttttttgttgttgtttttgagaaggagtctctgtcgcccaggctggagtgcaatggtgcgatctctgcaaactccgcctcctgaattaaagcgattctcctgcctcagcctcccgagtagctgacactacaggtgctggacaccatgcctggctaatttttgtatttttaggagagatggggtttcaccgtgttggccaggctggtctcgaactcctggcctcaggtgacccgcctgccttggcctcccaaagtgctgggattacaggcttgagccatggtgcctggctggggcctggatttctgggtctgtgtctaagggggtgctggaggctttgtctcctgggtcctgcccatgggggtaggggtaggagtggggatggagatggggtgggggcagggagaatattactgggtccagagggaggcaggactgggggtctagactcccagaggaagggtctgtgggtaagggtatagggtgtggctcaatttctccctctcccctacatcaccctttttagaggtctggtttcatttactcattcatcatttaaaataatttattgcagcagaggaggcattttgctgtgtattgtgaactaagcaggcaggaattcccagccctggagctggcattccagtgggaggccactctcagtttcacttggtgacctttcacagcactgaccatgttggccctatttctcccctgcttgcttgcttttctattttattttattattacatttttattgttagagagagggtctcattctgtcgcccaggctggagtgcagtggcaaagtggtgagatctcggctcactgcaacctccacttgcctcagtctcccaagtagctgggattacaggagcctgacaccatgcccgggtaatttttgtatttttgtagagacggggtttcaccatattggcttgaactcctgatctcaggtgatccccccaccttggcctcccaaagtgctgggattacaggcatgagccactgcggtggcctctcccctgctttcaagatgccatgctctcaggggtcccctccctctttctccatttccctggcaaagttcctcctcttcccccattcagtgtgtgttgtgataggggcagaatcctgtctgcactcacttccttggtgatctcacccagtcttgtggctttaagtaccatccataagccatcaacccccaaatttacatctccagaccagccttatcccctgaactcctaaatgcagtgaggttattcagcatctccacagggagattgtcaggcatttccaaccctgtatgcccaaacctcgtcactttccccgcaaacccacttccctacctttcatctctgccagcagacactcccatcttctcagcgtttcatgccagaaggcttggctgtctaggatccctctcaaacacacccacattcatttaatcagcaaattttcttggccctacctccaaaatatttccagatctccctagcctgcacacccttgccacctgtcattcccacttggaccaggccagcagcctccctggtctctctgaccctccccctgagttcgttcaccaaaggcagtaacggagacaccccctcaacacacacaggaagcagatggccttgacaccagcagggtgacatccgctattgctacttctctgctcccccacagttcctctggacttctctggaccacagtcctctgccagacccctgccagaccccagtccaccatgatccatctgggtcacatcctcttcctgcttttgctcccaggtgaagccagtggttacaggggatggtaggcagagcgtttgtgagatgggtgcttgggtgacgtctgcagggacgggtgatgaaagtggggttcttctccctgcaccccttcccttctgggagatccattctgcttcagggcctgggtccttgggggcggaagggggtgagacagggagttctggaggggctgcctgttagcgtccccttctcatggctgggtctctgctgccacttccaatttcttgtcactctccatgtctctgggagtccccttcccatgtggtcctgttccatctctccagcctggagattacttctcaggacactacctttccttctctacaccctattttttggtttgtttattttgagatggggtcttgctctgttgtccaggctggagtgcagtggcacaatcacggctcacggcagccttgacttcctgggctcaggtgatcctcccagctcagcctcccgagtaactgggattacaggtgtgaaccaacacttccagctaatttttgtatttcttgtagagacgaggtctcactatgttgcccaggctggtctcgaactcctgggctcaagcgatcttcctgcctcggcctcccaaagtgctgggatgacaggcgtgagccacggtgccaggctgagcattctgttttgtggaccttctctccaccctcatccaccttctttctctttccacagtggctgcagctcagacgactccaggagagagatcatcactccctgccttttaccctggcacttcaggtatcacttccaccccagaagcttggccagaggctcccagaacaccccagtggttctccaggtcaccatcccacctcccgtccccaaatcagaggatccgtgtccttctccgagtcccagaatcagcgacccccagcctgtgttcaggagcaccccgtgtgcccgccgcacagccccgagggtcctgggacaccccagcctctctgcatctgtctcccgtttcattccccaagcgcaactccaaggaacctgggacccgccccctcgcaggggacttcctctctgcctgtggccaaagcacagccccaggacgcagagcttgagttgtctccctgttccggcccccactctccaggctcttgttccggatgtgggtccctctctctgccgctcctggcaggcctcgtggctgctgatgcggtggcatcgctgctcatcgtgggggcggtgttcctgtgcgcacgcccacgccgcagccccgcccaaggtgagggcggagatgggcggggcctggaaggtgtatagtgtccctagggagggggtcccagggagggggcccttggggaagccctggaggaggtgctggggaaaccctgggggaggtgcctgggggaacccctgaggaaacccctgaagcagggggtccccagggaagtggagatatgggtggtcaagcttcatgctttctctcccctatccccagaagatggcaaagtctacatcaacatgccaggcaggggctgaccctcctgcagcttggacctttgacttctgaccctctcatcctggatggtgtgtggtggcacaggaacccccgccccaacttttggattgtaataaaacaattgaaacacctgtagtcgtattctttctcaaagaaccccagagttcccaaagcctccctcccatgaactgtttctggatccaaggccccctcagaacccccacatgtccccatcccatcagcccaaggatctggcataatgtttttgtgcttcatgtttattttaggagagtattggggagcggtctggtctctcagggatggcactctgtgggtctgtatcgcggtaggagttggaatgaggtgcagggtgggcttcaggaatggctggatccaggtatcatgttgctgactgtcatgattcgggctcatttgtaatacggcctctgtgtgttgaggtcgctgtagacatccgacctctgaccctggagctcctaaaggaatgggggccatcagtggaagggacccaccaaataaaatccagccttctcccagtggcctgcaaggcccctggcagcttcttcagccttatagccatgaaagagatccggattttattcaagtacattcaatgttcccccttctcctctgcctcatcagtgtgccccagcctcagggtccctgcgtgtgctgtttcctctgcctaaaactctgttcccctagatcccctctcccttcaagtctcagctcacgtcacctcctcagagaggcatttctcaatttcccctctgtagtttcttccccccacactccagccactgtaaaaaaaaaaaaaaaagcctgtttatttcctttactgtgcctcccaaaattattttatttgttcatttgctttaagtttgtcttaactaggatataaactctgtcactgtgtccccagcatttagcacttataggtgctagacacatccacagagggaataaatacatccgggtaatgctttgccctaaaatttcactgccaccagtaactggaagggcccctcggtcttctggatatcacagagccaaacctgagattcttagacttcacaaagaaactttatccacaagtgaggtgaataggcaaagctggttgcagacaatatatcagacttcacacagcagtgttcacacttggggtagggggaggatctatgtggcccccaggggcaggcctcagacagaaaccctaaaatcatatatgatgactagtctgggcgtgcattcttcaggggagaggtcttagagaatctcatgaccccctaaagggttaaaaaggaacattgacagagagggggatagatgactagattctcttgtatactctatagtttttaaaaagagcttcagccaggcatggtgactcatgcctataatcccagcactttgggagaccgaggtaacaggatctcttgagcccaggagtttgagaccagcctgggcaacatagtgagaacctatctctactttaaaaaaaaaaaaaaaattaaggccgggcgcggtggctcacacctctaatcccagcactttgggagggaaaggtgggcggatcacgaggtcaggagattgagaccagcctggccaacatagtgaaaccccatctctactaaaaatacaaaaattagccgggtgtggtggcatgcacctgtagttccagctactcgggaggctcaggcaagagaatcgcttgaacctgggaggtggaggttgcagtgagctgagaccacaccattgcactccagcctgggtgacagaatgagactccatctcaaaaaaaaaaaaaaattaaagtagagaaagaaaaaagagcttcaagaatactcaaccagcatggttgcttgagcctgtaatcccaagattttcggaggctgaggcgggaggatcacttgagactgggagtttgagaccagctggggcaacatagtgagacccctgtcttttttttttttttgagatggagtctcactctgtcgcccaggctcactgcaacctccgccccctgggttcaagcgattctcttgcctcagcctcctgagaagctggaattacaggcgcatgacaccatgcccagctaatttttgtatttttagtagagatggggtttcaccatcctggcctggctggtcttgaactcctgacctcgtgatccacccaccttggcctcccaaagtgctgggattacaggtgtgtgccaccatgcctggccaaaaaaaaattttttttaattataaagaacatttacactgctctcagattatatgcacaattttgtattttttgtgtagatttttctgggagtctagattttcttagtttctcaaagggatgaagggtcctcaaacccaaaaaagagattctaggactcctctctttagagttaccaaggtagggctgaatgacattctctgccctactgagagcgtctcccagaaatcagtcgtcctagggctgggtttcttccagaaaattcctggcctgacttctggcaaggcctgtgtttacacttacaaaggcaaagccacccttttttttttctttttaactcttcacgcttttttttttttgacagagttttcctcttgttgcccaggctggagtgcaattgcgtgatcttggctcactgcaacctccgcctcctgggtcaaaggattctcctgcctcagcctcccaagtagctgggattacaggcatgcgttaccacgcccagctaattttgtatttttagtagagacagggtttcaccatgttggtctcgaactcctgacctcaagtgatccacccgcctctgtctcccaaagtgctgggattacaggtttgagtcaccgtgcccagcccctcttcacacattttaagctgaccataagcttgtggttgatcattcggcccagttttggacagatgtcccatgtgccttcaaggtttgggggtgctttaggcagagtggctttgaggtccctctgatggcatgaaggagtatctggggcagatatccctggcaggagtgaaatgtgaggaggacagtctggttttctcacctgataaggcgactcggtctcagtgatacgctgtttccgggtcgctgctggaggtgaggggtgttgtggggtgcagagacaggcagagtggtgagttgagggtgttttgtcattccaaatcagcacctccattaccatccctttggatgtttgagatctgggagtttacccagccccccacccccatctaggcaagtcctcaggatgtcccctgctagccccactcaccctccgcagcccctcgcccccgagggaccagccggcccaggaagtacacggccagggcaatgagcactgtcagcaccaggtctcccatcacgatccctgccagcacgcccgggctcaccgtagagcaactgcaatctgcagcacaggggtcaggggaggtcagtgtgtgctgggaactgtggggaggggggtcagcggcagggaggtttggaaagggtgtgggagagacggagacagggaggtctctgggaggtagagagagggactgctgggtctaggcctaccgctctgggcctgggcctggacaggacggagacctgaggaggaaaaagaaggtaaactgaggcacagagttatgacgggggtgggggaggcaagtttagaagccagggaaggtggatcctgacagccaagaggttagcaagggggagagcgtgtctggcgggactcagggggctggcgtctgggccaccggactatgtgcgttacttctgcacaacttgtcctgtggcaacacacttagatgtctcttctcccctgcttgtagcggacgacaaaacttgggggcttgggctctgggagaaacccacaggctttgggaggttggggacctgctcccatcccaacacccacttttggttctctcgttccaccccactccctgccctgccccaagctgagcccagggacccgggaggcagccacggaagcccctaactcaccacttacagccagcaggagaggcaggagcaggagcctgctgcagggttcaagtccccccatgaagccggatgctgctggacaccacagtgtaagggccggtgggatgtggcgcagcgtccaggcaagtgaaggaggaagtctgaggcgggtggtggcagaagggaggaggagacaggggaggagagacagaaacaaaacccaagaaagaatcaggcccagacacccaggggccatgccacaggcccccagcaactagacgtgaagggcaaagggtacgtgaagcacaaacttcacctccgtccccagtcaggggtcagacatcgttttaacaggagggtcagtgtcatgaccttcctctggctgattgaaaccagctctgcctcttcctggctggtcaaccttgagtgcaatggcacggtctcggctcactgcaacctctgcctcccgggttcaagtgattctcctgcctcagcctcccaagtagctgggattataggcgcctgccaccatgcccggctaattttttgtatttttttttcttttttttttagtagagacagggtttcaccatgttggccagctggtctcaaactcctgacctcaggtgatccacccaccttggcctcccgaagtgctaggattgcaagtgtgagccaccgcacccagctccaacctcagtttcttcatctgtaaaattgggagtaaaatgggacctactttttagagttgtggggattaaatgaattaaagttcctagaccagggtctgacccttgtcagctttttaaaagcatcagctatgatgatgattatttaatcatcagaaacttgtgctgtttaaaggatattaaaagagccagcagcatgtgggcactaatgacatgcaggcactctgtcccaagcgttaaatcattcagtccccgcaatgcccttctagggcacatgctcttatcatccccattgttcagagaggtagagacgcttgcctaaggctgcacagcaaatcaaggtggaaatggaacccaagacccaaaatcaggtttttgactagggaagagtcagggggaaaaacaaagatgaaagatggggaaggagaaaacagcggcaaagctgagaaaggtgagagtaaggcagtggcacagacacagaggcacggctggcggcttggggagaggcaggtggctggctctcctgctgaatgaggaagtggctgggagcaaggcccaagggaggccaccccaaggagacggggacttctagcccccagctggagcctggggctggggaaggaggaacctgaggttagggtgctggaggatgagacagctgcaggaagcccccctcccccatccacacgtcacacccaccgctccttgggcctgggcttaggagaaaaaaggggaaactggattctggtcacagggcagatgcccagtggcctgtgggggaagggaggagaggagatttggagcctggaggagggtcaggtcccagctcagcccacggtcaccactgttcaggcctggctgagtcccctcccttaaaaacccaagcctctcccattgtgtctagagcgagcatggagggaacagaccctgtaggtcctcccgggcacaccaggccacccaatgtgttggagcagagtgggcgagggggcagtcagagaccagagcagggctctgagccaggagggccctgacctgactcaggggttcacaggttccctccggccgcaggtggggagcagactgtggaggcagggactggagcagggaggccaggctgctgggatatttgtgaggatattgtgaggtctattagaataatgcctggttgagttcaagaccagcccggccagc[131 bp omitted]gaaacccggtctctactaaaaatacaaaaaattacctgggcatggtggtgggcacctgtagtcccagctactcagaaggctgaggcaagacaataccttgaacctggaaggtggaggttacagtgagctgagatcgcgccactgcactccagcctgggcgacacagcaagactctgtctcaaaataatgataataataataaagggccaagcgcggtggatcacgcctgtaatccaacactttggaagaccgaggtgggcggatcccctgaggtcggcagttcgagaccagcctgaccaatatggagaaactcggtctttactaaaaaatacaaaattagcctggcgtggtggcgcgtgcctgtaattccagctactcaggagcctgaggcaggagaatcgcttgaacccaggaggcagaggttgcagtgagcagagattgcgccattgcactccagcctgggcaacaaaagcgaaactcagtctcaaaataataataataataataataataataataataataataataataataaactttcactcctgctctaaaacttaccttggtttctcactctgccttatgtcccttggtcaaattcttttttgaggaggcaaggattgaggttgctgcagacccctatggattcactgctgcgaacatacttcggtaccgtgtgacttggatatgttccatgctaaaaattagtatgtccagtctcgagttctcagcttagcttgataaaaatcctccctcagccaggtgcagtggctcacacctgtaatcccaggcgtgattttggattttgggactttaggaggccaaggagggtggatcacctgaggtcaggagtttgagaccagcctggccaacatggtgaaaccctgtctctactaaaaatacaaaaactagccagacatggtggcaggcgcctgtaataccagctacttgggaggctgaggcaggagaatcgcttgaacctgggaggcagaggttgcagtgagccaagatcatgccattgcactccagcctggatgacaagagtgagactttgactcagaaaaaaaaaaaaaatcctccctcagtccttcagcatcagcctcctagtctcatcctccccacttcagccaggcctgggctgtccccagaagatattccccaagcaccatccagtcatacggatgtggccataggggctggaatcagggtcctagagcgccacctttagttgctgagatgtgggaaagtccaaggggtccccaaagaatggactcgggtggtagcagacatctgtgggctatgtgggctctttactaaccagaagtggaatgtttcaacattttagcaaccaatacaactgtgctgatgcagaccacaggtggcaggtctgggctggcctctgggctagaggacggataaaacactctctttggccaggcatagtggctcacacctgtaatcccaccactttgggagactgaggcgggtggatcacttgaggtcaggagtttgagaccatcctggccaacatggtgaaaccccgtccctgctaaaaaatacaaaaattagccaggcgtggtggtacacatctgtaatcccagctactcaggaggctaaggcaggagaatcgcttgaacctgggaggcagaggttgcagtgagccgagatcgcaccactgcactcaagcctgggcaacagagcaagactccgtctcaaaataaacaaaacaaaacaaaacaaaaaaaccctccctctttggatgaaggaagaagctgagattcagggcacccagcaacaaggcgctgccccaagacactgccagactcctggaagctgagctgagggcctccacacaagatcaagaggtgagtgtctcaccctctctgggcagcaggccaagagttggggaagccaacgctgactttcccagaaaccaggtagtgtgttggcctgtgaccagctcacttctgtggaagctacagtccctccccactctcccagcttccacactggcccctccacagcctgtcctcctcaaagcagctggaagctttgtaaaacatcagatgaatagaggccaaggcagaaggatcgcttgaggccaggagttcaaaaccagcctgggcaacataacgagaccctgtctctaattcttttttttttttttgagatggagttttgctcttgtcgcccaggctggagtgcagtggcgcgatctccgctcactgcaacctccacctcccgggttcaagcaattctcctgcctcagcctgccgagtagctgggattacaggcatacgccaccatgcttggctaattttgtatttttagtagagatggggtttctccatgttggtc[132 bp omitted]gcctgtcatgccaacactttgggacaccaaggcaggcatattacttgacctcaggatttcaagaccagcctgggagccaggcgtgatggctcaagcttgtaaatcccagcactttgggaagctgaggcaggtgaattgcttgagcccagaagtttgagaccagcctgagcaacagggcaaaatcccagctctacaaaaaatacaaaaattagcccagcatggtggcacctacctgtagtcctagctactagggaggctgaggtgggaggatcacctgagcctggggaggcagaagctacagtgagctttgattgtgccacagcagtccagcctgggccacagagtgagaccctgtctcaaaaaagaaaaaaattaattaatttaatttaaaaatcagacaaatagcctaatttttaagtgaccaaaacatttgaacagacacttcactaaagatgagacgtgaaggccgggcgtggtggctcactcctgtaatcccagcactttaggaggccaaggtgggcggatcacctgaggtaaggagttcgagaccagcccagcaaatatggtgaaaccacatctctgttaaaaacacaaaaattatctgggcgtggtggcagtttcctataattccatctactcaggaggctgaagcaggagaatcccttgaacccaggagacagaggtttcagtaagccgagatcgcaccgctgcactccagcctgggcaacagagcaagactccatcaaaaaaaaaaaaaaaaagccagcgtggtggctcacgcctgtaatcccaacactttggaaggccaaggcgggcagatcacctgaggtcaggagttcaagaccagcctggccaatatggtgaaaccccatctctactaaaaatacaaaaattagccaggcacggtggcaggcatctgtaatcccagctgcttgggaggctgaggcaggagaatcacctgaaccttggaggcaaaggttgtagtgagctgagatcaagccattgcactccagcctggacgacaaaagtgagactccatctcaaaaaaaaaaaaagaagaagaagaagaagagacatgaatggccaggaagcctgtgaaaaagtgctcagcactattagtcattagggaaatataaacgaaacctcagtgaaatgtcactgcacgcccacttaaatgactaaaattaaaaagactgaccctatcgagtgtcagcagaaatgtggagcagttggaaatctcagacactgccggtggaaatgaaaaatagagcaaccgctttggaaaatagtcggttgtttcctttaaacattctgcagtagctcacacctgtcatctcagtgccttaggggactaaggtgagaggatctcttgaggccagaagttcaagatcagcctgagaaacatagcaagataccatatttacaaaaattgttcttttttttgagacagagtctcattctgttacccaggctggagtgcagtggcacgatctcagctcactgcaacctccgcctcctgggttcaagcaattttcatgcctcagcctcctgagtagctgggattacaggcacccaccaccacgcccggatagttttttgtatttttagtacaggtgggctttcaccatgttggtcaggttgttctcaaagtcctgacctctggtgatccaccctcctcagccccccaaagtgctggaattagaggcgtgagcaactgtgcctggcctaatttttctatttttcatacagatgggctttcaccatgttggtcaggctgatctcgaactcctgacctcaactgatccgcctgcctcagcctcacaaagtgctgagattacaggcgtgagccactctgcctggcccaaattttttttttttttttttttttttttttgagatggagtctctctctgccgcccaggctggagtgcagtggctcgatctcggctcattgcagcctccccgtcccagattcaagcgattctcctgcctcagcctcccaagtagctgggattacaggcatgagccaccacacctggctaatttttgtatttttttagtagggacagggtttcgccatgttggccaggctgttctcacactcctggcctcaagcgatcctcccacctcagcctcctaaagttctgagattacaggcatcagccaccatgcctggcccccaaaattgttttaaattagctaggcgtggtggagcacacttgtggtcccagctactcaggagtctgaagcaggaaggttgcctgaacccagggattggaggttgcagtgagctatcgtggcactactgcactccagcctgggtgacagaaggagaccctgtttcaagagaaagaaaaaaggaaggaagaaggaagggagggagagagagagaaagaaagaaggaaagaaaagaaagaagaa[143 bp omitted]gaaaccctgtctctactaaaaatacaaaaatattagccaggcatggtggtgggtgcctgtagtcccagctactcgggaggctgaggcaggagaatggcgtgaacccaggaggcggagcttgcagtgagccgagattgcgccactgcactccagcctaggcaacagagtgagactccatctcaaaaaaaaaaaaaaaaaaagaaggggatgtgtgatgtgttcaatgacattagggaacccactgaatctctaggaggtccaagaaatcagtccctgagctacacagatcagatcctactcctgccttggggagcaaacacctcagctccactgctaaagtgatctgggaccttctgtgaaggcttctgtcatttgcatcagacactgggggaagtttggcaatttctaagaaatttaaacataaacacaccatacaacccaacactcccactcctaggtatttaccaaagagaagtgaaaacgtgagtttatacaaaaaccagtaccatatattaatagtggctttgttcataattgccccaaactggaaacaaccgaatggttcttcactggatgaatggataaacaagttgtttatccatttttttgagatccacacggtgggatactactcagcaataaaaaggaatgaactatttttacttatctttttattggagaaagggtcttgctctgttacgcaggctggagtgcagtggtgcaatcatggctcactacagcctcaacttattgggctcaagcgatcctcccactttagcctcccaagtagctgggactataggtgcgcatcaccatgcccagctaatttttatatttttcatagagatgatgttttgccatgttgcctgggctggtcttgaactcctggcctcaagcgatcctcccacctcattctcccaaagccctggaattacaggtatgagtcactgcacctggcctcaccaatatttttttctccccttcttcttctataggtgtgagccaccacgtctgttttttttttttgttttttttttttttttgagatgaagttttgctcttgttgcccaggctggagtgcaatggtgcaaccttggctcactgcaacttctgcctcctgggttcaagcgattctcctgcttcagcctcctgagtagctgggattacaggcatgcaccaccatgcccagctaatttttgtatttttagtagagacggggtttcatcatattggtcaggctggtctctaattcctgacctcaggtgatttgccagcctcggcctcccaaagtgttgggattacaggcgtgagccaccactcccgacatcctaatttttatttttatttttttagagatgtgatctcactctgtcactgaggctgtagtgtactagcaggaacatagctcactgcagcctcaacctcccaggctcaaataattttcccacctcagctctgcaagtagcagggactactggcaggcaccgccatgccagctaatttttaaatttttttgtagagatagtgtttcaccaccttgcccaggctggtctcaaactcctgagctcaggcaatccacctgccttggcctcctaaggtgctgggattacaggtgtgaacccccttgcccagccaccccttcctctactgaaacagaatttgtagttgggcatgagattccctagccaagaagatgtctctcatcctctttggagcctgttggggccatgtatctgttttctggcaaacggaacttgggaagaaatgatgcgggcaacttccagattgtgtccctaaagtcagagtatgccctctccttttctgctcttcctattggctggaatgtggcccttattctggctgtgggcacccactttaaccacaacagctaacattttgaaggctttttaagtagaatccaagtaatgcttgatggtttcatcaattgtggttcatccataacataaatagagtcatggccaggcatggtggctcatgcctataatcccagcactttggggggctgaatcaggaacctcaattgtggccaggagatcaagaccagtccgggcaacatagcgagaccttgtctacgaaaacaaacaaacaaacaaacaaacaaacacatcagccgagtgtggtggtacatgcctgtagtttcagctacttgggaggctgagataggaggatcacctgagcccaggaggttgaggctatggtgagtcatgatttgattgggccactgcactccagcctgggcaacaaggacagagcaagactctgtctcaaggggaaaaaaaaaaaaattaagaacttgccacagtggctcatccctgtaatcccagcactttgtggggccaaggcaggaggattgcttgaggtcaggaggtgtagaccggcctgagcaacatagagagacactctctctacaaaaaaaattaaaaattagccgagcgtggtggcacacacctgtagtctgagctacttggggggctgaggtgggaagatcacttgagccctggaggtcgaggctacagtgagccgagatcacgccactgcactccagcctgggtgacagagcgagactctgtctcccaaaaaaaagaattaatggccgggcgcggtggctcaagcctgtaatcccagcactttgggaggccgaggtgggcagatcacaaggtcaggagatcaagaccatcctggctaacacggtgaaaccctgtctctactaaaaatacacaaaaaaattagccaggcgtggtggcgggcgcctgtagtcccagctactcgggaggctgaggcaggagaatggcgtgaacccaggaggcggagcttgcagtgagcggagatatagcgccactgcactccagcctgggcgacagagtgagactccgtctcaaaaaaaaaaaaaaaaaaaaaagaattaacattcaccaaaagatatcttagaatgataatgtggctatatatttagatctatattttaaaaggtcattattacttagcgatatgtacttcctacaaatttgggaggtgaaataataagacgtctggaaagtgttaaaagcaatccaataaagaagaagtaggttcaggtagagagggaataagattagcacgaattgacaattattaaagctggcaataagtctatgggaattcattatacgattctctctacttttgtgtatgtttgagattttttattaaaaaaaagataaccattagaaaatggttacagagtaggagaagaaatttgtaacacataatgcaatgaatctgaacatatcctgcacacataaataactccttaaaaacaaacagcaaaccccagaagaaaaattggcaaactcaagtagacacttaattaattaatttaatttattttattttattttttggagacagtctcactctgtcacccaagccggaatgaagtggtgcaatcttggctcattgcaacctccacctcccaggttcaagcgattctgctgcctcagtgtcccgaatagctagaattacaggcacatgccaccacacccggttaatctttgtatttttagtagagacggggtttcgccatgttgaccaggttgttctcaaactcctgagctcaggcaattggcccaccttggcctcccaaagtgcttggattacaggcatgagccactgcatctggccaattgatttatttatttgaaacagggtctcactctgttacccaggctggagtagagtggcagaatcctagctcactgcagcctcaacctccctggcctaagccatcctcccacctcagcctcccaagtaactaagaccataagtatgggctactatgcctggctaatttttaaatttttttagaaacagggtcttgcccaggctggtctcaaactcctgggctcaaggcgtcctctggccttggcctcccaaatttcggggattgcaggcatgagccacttcaagcaagcacttcagaaaagaggaactctaaatggcaataaaggtgtgaaaaggtgctcatcctcagaaggagaacaaacattaaaacaatgtaaggcctggtgcagtggctcacgcctgcaataccagcactttggcaggcggaggtggaaggatcacctgaggtcagtagttcaagaccagcctggccaacatggcaaaaccccgtctctactaaaaatacaaacatagccggcatggtggcacatgcctgtaatcccagttacgaggccgaggtaggagaattgcctgaacccggtaggcaaaggttgcagtgagccaagattgcaacactgcagtccagagtgggcgacaagagtcagactccatctctaaaaacaaacaagactagtagcgcaaaaccgctccacacctttccctctacccctagaaatgtcgaaattttcaaaatccgacactaccagatgtggtgaaatgtggagccacagaaaatctcatacacctctgaaggaggcagaggggttgaaccactttgaaaaacagtttggcactttacttcccagagacccaacttccgcccctatctgtatctgagagagatgggtgcaatagatgccaggagccttgtgtaaggatagtcaccctatttgtaaggccaccctatttgtaaggcttttcaaaagaaacaacccaaatgcccatcgcaggagaaaggatacataccttggggcatatcacacaatggaataccgtgtaaccatgggaatacataccctagatccatttgccacaacatggacttatctctcaaagataatgttgagtggaagaagaaagaagccgcgggcacggtggttcacgcctgtaatcccaccactttgggaggccgaggcgggtggatcacgaggtcaggagatcgagaccatcctggctaacacggtgaaaccccgtctccactaaaaatacaaaaaattagctgggcgtggtggcgggcacctgtagtcccagctacccgggaggctgaggcaggataatggcgtgaacccgggaggcggagcttgcagtgagctgagatcgcaccactgcactccagcctgggcaacagagcgagactctgtctcaaaaaaaaaaaaaacccgcatacaagagtatatacaatatggttcctccttacatagagttaaaaaatagtccaaattagactacactgttttaggaagcatacatgtaaggcaacattattattattattattattattattattattattgagacggtctcgccctattgcccaggctggagtgcagtggcccgatctcggctcactgcaagctccgcctcccgggttgatgccattctcctgcctcagcctcctgagtagctgagactacaagcgcccgccaccacgcccggctaatattttttgtatttttagtagaaacaaggtttcaccgtgttagccaggatggtcttgatctcccgacctcgtgatccgcctgcctcagcctccgagagtgctgggattacaggcgtgagccacggcgcctggcctattattattattattattattattattattattgttgttattattgtagacagggtctggctctgtcacccaggctggagtgcaatggcacaatcactgcagcctcaaactcccaggttccagcaatcctcccacctcagcctcctgggtagctggtactacaggtgcatgccaccacttctgggtaatttttttttttattttttgtagagatgaggttcttactatgttgcccaggctggtcttgaacttctgtcctcaagggatcttcttgcttcagcctccccaagtactggagtaacaggcgtgagtcacctcgccctgccaataggtggcaaaataattaagaaaatcagaagtgttccatcagaaccaacatggtggttgcctttcaggggacagtacactttgtaaataaaaaggaacaaaagaggaatgttctagaatacatcaattacatttatttatttatttatttgtttatttatttatttatttttaagacagggtccccctctgtcacccaggctggagtgtgatggcacaatctcagctcactgcagcctcgacctctggggctcaagtgatcatcccacctcagctttccaagtagctgggactacaggcgcatgctaccacacccagctaattttttgtattttcggtagagacggggtttcgtcacgttgcccaggctggtctcgaactcctgagctcaggtgatccgcccacctctgacttctctcttcatgtggaagtagatgcctgaataattttactcaatgattcactgtgctgtgcatttgtcttcatctataggcattttgtatgtcacaacagataaagtttaaaagatctagccaggcatggtggctcatgcctgtgatcccagcactttgggaagctgaggcgggagggtcacttaagcccacaagttcaagaccagcctgggcaacatagcgagaccctgtctctacaaaaaaatttaaaaattagccaagcatggtgatgtgcacctgagatatcagctacacaggaggctgaggcaggaggatcccttgagcccaagaggctgaggctgcagtgagccatgtttgtgccactgcactccaatctgggtgacagagtgagaccctgtctaaaaaaaaaaaacactatgcaaaaattagccaagcttggtggtgtgcacctgtaatcccagctacttgggaggctgacgcaggagaatcgcttgaacctgggaggtggaggttgcaatgagccaagattgtgccattgcactccagcctgggcaacagcagagactccgtctcaaaaaaaaaaaaaaaaaaaaaaaaactaactaataatgcttgctcattataaaaaatttgaaaaatgcagcaaaataaaaaagaaaaagaaaattcacccacttctaagagacagcttctattaatgtttaattatatttcctgtcttttactgggcatatttgtatgtattctgaccatcctgtatatagaaatttgcatcctgaccatactctatatgcaaatttgcatctggcacatttttgcaaacaatttttattaacttggaatgaacagctgtatttccttcaactactcaaatatgacctgacctcactattgtacaccacctttttgctctggaaagtaaccaaagagatgatcctcacagtccttagggcagaataaattatgttttttcttttttttttcttttttcttttttttcactctgttgcccacgctggagtgcagtggcgcgatcttggctcactgcaacctctcactcccaggttcaagtgattcttctgcctcagtctccccagtagctgaggttataggcgtgtgccaccacacccgcctaatttttgtatttttagtagagaccgggtttcgccatgttgcccgggctgatctcaaagtcccggactcaggtgatccacctgcctcagcctcccgaaagtgctggaattgcaggtgtgagtcaccacacctggccagggcacaatacattttttgttttgttttattttttgttttttgagacgcagtatcgctctgttggccaggctggagtgcaatggtgtgatcttggctcactgcaacctccgcctcccaagttcaaacgatcctcctgcctcagccccgctagtagctgggattacaggcacgcaccactatgtctggctaatttttgtatttttagtagagacagggtttcgccatgttggccaggctggtcttgaattcctgatgtcaagtgatccacccaccgcggcctcccaaagtgctgggattacaagcgtgagccaccgcaactggctttttttttttttttttttttttttgagacagagtctcgctccgtcaccaggctggagtgcagtggcacaatctcggctcactgcaacctccaactcccaggtacaagtgatcctcctgcctcagtctcccgagtagctgggattacaggtgcccaccaccacgcccagctaatttttgtatttttagtagagacggggtttcaccatgttggccaggatggtcttgatctcttgaccttgtgatctgcccacctcggcctccctaagtcctgggattacaggcgtgagccaccgtgcctagcccagaataaattaaacattaaagcttagatttcatttctcagttcacttgtatttagaaagagctgtgggggcgaatctgtttcccttttcctcttccccctgcctgggagccatcctggatctttcaggccagtgctttcccagggatagtagcacaaaagtggaagccacctggatctctgactccgtgaagccttcacaccaattctgcattctttatgtttggtcaatttgtaggagagaaataaagttcgattttgcttaagccactattatcaatttcagctacttgtatttcttgtctaacaaacagtgctcatgaaacatgatccatttctcatattcctgaatctctttagaaacaccagtcttgaggctgggttcagtggaaggccaaggcaagagaatcacttgaggccaagagttcaagaccagcctgggcaatataacatctctacatacatgaaataaaaaaaatacgacgtgagtggatcatctggggtcaggagttcgaaaccagcctggtcaatgtggtgaaaccccgtctctaccaaaaatacaaaaattagctgggcatggtggcacacaccagtaatcccagctactcaggacgctgaagtgggagaattgcttgaacctgggaagtggaggttgcagtaagcggagattgcgccactgcactccagcctgggtgacagagtgagaccctgtctcaaaaaaaatacttaaataaataatttatggcgtcataaaaatccttgtaatgaaatcttttcctacttgctggagtacttccaggaagtaaattcctagaagtagaaataatggaacaacagatatgcgcattttcaggctttggatgcaggctgcccagttcttccgaaaggtcatcctcgtttgcagccagcaatgggagtggggtctcccatgtcgctgtgctctccttggctatagggaaccagatttctgatatctttgctgatttgacggcaaagaggagggtttcagtacttcaagttcagttattactggtggtaaacttggctttgatcaatttcagctatttgtatttcttttgtgatctgtcttttcctctcatttgcccatttctcttttggctgattggcttctcatattaaatttattaatgttttcattaccttaaggatgttaactatttttttcttttgtgatctgtcttttcctctcatttgcccatttctcttttggctgattggcttctcatattaaatttattaatgttttcattaccttaaggatgttaactatttttttcttttgtgatctgtcttttcctctcatttgcccatttctcttttggctgattgccttctcatattaaatttattaatgttttcattaccttaaggatgttaactatttttcttgttttcctttaaaaaaatttttttttaaagagacacagtctcaccctatcatccaggctggagtgcaatgacagatcacagcttgctgtaatctcctgggcacaagagatcttcctgccccagccccccgagtagctgggactacaagcatgcaccaccacacctggctaattttcgtattttttattagagacaggatttcaccatgttgcccaggctggtcttgaactcctgagctcaagggatcctcttgccttggcttcccaaaatgctggaataacaggtgtgagccaccacacccagcctcttcccacattttactctagtccatctggaatttattttcatttatcagtctccaaattaatatttgtacctcaaatggctaagacagaaatccaactgctgtgacattatgcttctgttctataatgcattcttgctcttctgctctgtctttggccagtcattctggtacattacccatcaagattgttcttacactgaaacacactttaaattatgtgagcttcatgatgttactatcttgtaaccaggctctatccacagcacctagagcctggcacatggcaggatctcaagaaatatctggcaaaagaatgaattactgaatgaataagtgggaaaataaatgaataaatacaatatgcagctgagcgtggtggctcacacctgtaatcccagcactttgggaggccaaggcaggaggattgctcagccagttctggccccactcaacagcccagctgagctcgaaaccaacagccagtgacattgccaaccatggacatcagccaccttggacatcagcctggttgaactttcacatgactccagctccctccaacatctaacttcaccacatgagtaacaccaagcaagaaccaccctgctgagcccttcctaaattcctgacccaaaaactcagagggaaactaaaataagccacttcacttggggataatttgttacgcagcaatagataactgaaacactgggtttgcaaactcaaccctcactctaaccctacagcatccagatgtttaatgtaaacagtgagttgggcctggtgcaggtgagcaggtgcggtgggagccctgaggcactggggaacctgtgctgcactgccctgagctgtatgtctccccagatttgttccttgccctcccctttcttcccccatcctaggctgctatttccagtcttccctccagctggggttgaatcaatgggaagctcaggtaggaggctggaggaccagaacaagcagccagggtcattccactccccaagggtcattctcctccttctcctggtagttatgcctcctctagagccccagctcctgccagccagacaatcccactgtgttcccagcttctactaggaaaccttatctctgggctccggtgacaccacctcctccctttgttcctccaacttacggtggaggcagcttccctctgctgctaatttccagtttcttcactgactcccactgggcccctcagctcctccttccctacttaaccatctccatctccaggtgttcatgtccccctgtgtttttgtcattgttgttgttgtttatttatttatttattacagacagtttcgttcagttacccaggttggagtgcagtggtgcaatcatagctcactgcagcttctaactgctaggttcaagtgatcctcctgcctcagccttctgagtagctgggactataggcacaggccaccacacccaggtatttctatttattttatttatttatttattcattttgtagagacaggatttcac[131 bp omitted]tgcgggacatgccatgcagagaatgaaaggtgggtgctgtgtgaacgtgggtacaaggaagttaggctttcactggggtggcacaatggcagctctgaggcaaaggcatcagagcaaaagagaaggaaaagagggagcctgccctgcaaagatctgggagaaccgtgctcccagaagaggaatggctatcacaaagacccaaggcaggaaagagctgggagtgcctgaggaacagggagaaggttgagcaaaaagagcagcaacatggggcaaaaagagcaggatcatggggagatgatacgaggatggagaagttgctgtggtcacaggagccatgggcaggagtttgtgcaaccagtttgtccattacccgatgcacacagcaaatcaagacagccagttgcagctgagaaagaggattagttgtagggtcaacaaataacaacatgggagagaagctcaaattcatctccctcaggaatctggagcaaggattttttttttttttttttttttttgagatggagtctcactctgtcgccaaggctggagtgcagtggcgccatctcagctcactgcaagctccgcttcctgggttcacgccattctcctgcctcagcctcccgagcagctgggaccacaggcgcctgccaccacgcccggctaatttttttgtatctttagtagagacggggtttcaccgtgttagccaggatggtctccatctcctgacattgtgatctgcccgtctcggcctcccaaagtgctgggatcacaggcgtgagccaccacgtggggcaaggatttttaaggatttgggggtgagacaaagtgtggatatcattgttggaagactgccgggtgaagtttagggacatggagaggaagaagcagtattctcatactactggcagtcctctgtgggggtcttcacattggttgctggaatttgggggtctgataaacaactcaagtgatcttttttaaaaaagccttaagattctaatgtcagagatcctgcctgtgggaacaatggagatgcaagtcaattaaatgatcttatgaccctaatgtcagacatcctatctataggccaggcacagtggctcacccctgtaatcccagcactttgggaggccgaggcaggtggatcacctgaggtcaggagtttgagaccagcctggacaacatggtgaaaccccgtctctactaaaaatacaaaaattagctgggcgtggtggcagatgcctgtaatgtcagctactcagaaggctgaggcaggagaatcgcttgaacccgggaacgagaggttgtagtgagctgacatcatgccactgcgctccagcctaggcaacaagagcaaaactctgtcagaaagaaaggagaggagaggagaggagaggagaggagaggagaggagaggagaggagaggaaaggaagagaaagaaagaaatcctatctataggaacaatgggggtctagtaccacctgacttttagcaacaaggaagtggac[139 bp omitted]gtgaaaccccgtctctactaaaaatacaaaaattagccaggcgtggtggtgggcacctgtaatcccagctactcgggaggctgaggcaggaggatcacttgtacctgggagttggaggttgcagtaagcggagattgcactactgcacttcagcctgggtgacagagtgagactcaaaaaaaaaaaaaaagacagacaggcatggtcggcttgttaacatgcagactgctgggtcccccagagattctggttcagtagatctagaacaacagagaatttgaatttctgacaaattgtcatgtgatgctaatgctgctggcagaggtcacactttgaaaaccactggtctagaaaaacaccttttttttttttgagacagggtcttgttgtctcacccacgctgcagtgcagtggtgcagtcacggctcactgtagcctcaatctcccgggctcaagtgatcatcctgcttcacccttctgagtagctgggactacagggtgcaccatcccacctggctaattttttaaagattttttttttaatatgtggggtctcactaagttgcccaggctggtgtcaaattcccagactcaagcgatcctcctgtctgagactcccaaagtgctaggatcacagctgtgagccactgtgtccagccacaagtgaaagtaagttaataaaatatgtcacttgaatttaattattttgctaataattaatagatatgctgggcatggtggctcacatctgtaatccctgcactttgggatgccgagccgggtggatcacctgaggctgggagtttgagaccagcctgaccaacatggagaaacctcgtctctactaaaaatacagaaaattagccgggcgtggtggcacatgcctgtaatcccagctattcgggaggctgaggcagaagaatcgcttgaacccaggaggcggaggttgcggtgagccgagattgtgccattgcactccagcctgggcaacaagagtgaaactctgtctcaaaataataataataacaataataaatagataatatttatataaacatatccaaaatactatttcaacatgttatcaatattttataaatgactgagctacttttttttttttctttttatttgagaccgagtttctctgtagcccaggctggagtgcagtggcatgatctcagctcactgcaacctctgcctcccgggttcaagttattctcctgcctcagcctcctgagtagctgggattacaggtacatgccatcacacccagctaatttttgtattttcagtagagtcagggtttcaccatgttggccaggctagtctcgaactcctgacctcaaacgatccacccgctttggcctcccaaagtgctaggatcacaggcatgagccgccccacccggcttacattcttttttcctattaagtcttcgaaatccctgtgtatattttatatttgcaacacatcacaattaggacttgtcttcaatagccacatgtgtgactagtggctaccatactggacagcacaggacaggcctggaatggtggccactgttgcggggatagtgagttgaaggtggagacttgcctcttgaatttagcaacgaggatgagctttggcaataaaaagtttcatttttgtgaaatggagagagagagagtatatgaacacttccttcctgaagtttgggtgtggttttaacaccaatagagagatctggctaacaaaactcaaaaccaacaccagatattagcagcacaaaaaaagacaaccacatattatgtcccttctgataggagatcttaatattatccctgaagtatacttaaccccaaactgaatgtgtatctgactcagcctctagatctaccagtttgcaagacatacagaggatggcagaacatattaaaggacaccaagaggggaaaccagtcaaatcagactgagaagagattatttataggtggatagtgtcaaaaagaaaggaaaaaattaaaatttgtaaaaaacaaaaaaaaaaatcacactttgggaggccgaggcaggaggatcgcttgagctgaagagtttgagaccagcctgggcaacacagtgagaccctgtctctattaaaaaaaaaaaaagtataaaattttggccaggtgcggtggctcacacctgtaatcctagcactttgggaggtcaaggccagagaatcacctgaggtcaggagttcgagaccagcctggccaacatggtgaaaccctggtgcagtggcccatgcctgtaatcccagctactcaggaggctgaggcaggggaatcgcttgaacctgggaggtggaggttgcagtgagttgagatcgtgctattgcactccagcctgggtgacaaaagagagattccatcttaaaaaaaaaaaaaagtataaaattaaaaaattagactgagatgaatgagagggagagggaacagttataaaatagaagacttaaagaggtaacaaacaaatacaatgtacaatgcaggcaccctggtcggattctaatttgaacaagccaacagtttaaagacatttctatgacatttagggaaatttggagacaggatgaatgttaagacactactaaggatttgttggttttttaggtgcgataaaaatgttatagtaatgtttttttaagaaccttatattttagagatacataatggatgaaatcatgtgatgtctgggatttgctttaaactaactttgggggaggtggaataaataaaacaagattggccatatgttgataattgttgaagctgggtgatgggtacttagaggatcattacattattctatttctgtgtacgactgaacattaataaggctttaaaagggggactgctgtgaaaaagagaaaaaagtagggaaattgtgtgttttttccccccaggatcgaagcgcctttaacaggctccacagctgacaaggacgttgggatgcaagagagtgagaaggcgccagggtggctgcagggcacattcaatagtcggtctagctcttgctcccgcggctgccttctctgcagctctggaggctgcagcttctggtcctggaccgggacttaggtccacacccacgtgctgacgtcgggcaggctcagcggcctcccgcgcctgcgcagcaccgcccttttcgggcgcggcgcccagtccctacaccccacaatcccccgcgccgttccggaggcgcgctaggagtgggtgtggcctctgcctccacattggaacaaggtgaggcagagggtgtcgcgtggtcttctgggaaatgtagttcgtctgccaggccggaaccaccgctcaaccggctcgcgagactatgcaccccacaatgcgccgcgcgcgcagcggctaagcgatgcgttgctgcctccacgtggtggctgagtgatcatgctccggtttgggaatggggcccagaagggtagggttaggggcggggacggtgctggggatgctgagggtcgccctggaaacctctgggaagattttccagagggtaagtcccctgaacctggcccacgaaagggtagtagtaatgaagaaattggaggtggggcccgctatgaggaccgaatgacagagcagcacctgttggctgcatatgataatcaggctactgttacacctaagactcacacagtaggcacttcctaggccacttaccgctccctgcgcttcaggtatcttagcccattcaatcctcccagccaccattcgagatattatcagccctcctttctaggagtgaagctgaagcccagaaacgcgaatcacttgctcaaagttattcaacatgtcagtggcagagctgggatttgaactaggctgtcgggctaccaagtctgggctcttcttcataggaatatctcatcaccctattcagttatcctaaaattgtaattagcacatgaatcaagtcaagatggtcattaacatgtgaatctctttgagtcgctgattaccagcgcttgttcctgcccaaatttgtgacttagacctgcttcaggacaaagttgacaatcaacatagatttatagttagcacatgaatcagcacaggtttctgttcacagggatcagatttctgattagcacttgaatcagcagtggtttgtgtcaacagctggagtctttaggttcctgatttgcacagggatctccatccagggattattttcttgcctaaataggcctgttcctttatgtccaggtgaccttctcttcaaatgttgtcccagctgggtgcagtggctcacgcctgtaatcccaacactttgggaggctgaggcgggaagattgcttgggtctgggagtttgagaccaacctgggcaacatagcgagaccccgtgtctccatgaaaaataaaacaattagcctggcatggtggcatgctcctgtagtcccagctacttgagaggctgaggtgggaggatcccttcagcccaggagtttgaggctgcagggagctatgatcatgccactgcatggcagcctcagcgacaaagcaagaccatttctcttaaagaaaaaaaaaaaagggcgggcacagtggttcatgcctgtaatcccagcactgtaatcccaggttgaggtgggcggatcaactgaggtcaggagttcgagaccagtctggccaaca[138 bp omitted]tggtgaaaccccatctctactaaaaatacaaaaattagcagggcatggtggcacgtgcctgtaatcccagctactcgggaggctgaggcagaagaatcgcttgaatccgggtggcggaggttgtagtgagccaagatcatgccactgcactccagcctgggtgacagagcgagactccgtctcaaaataaaaatcagccaagcgtggtggtgcatgcctgtaatcccagctactcaggaggctgaggcaggagaatagcttgaacccaagaggtggaggttgcagtgagccgagatcatgccactgcactccagcctgggcgacagagcaggactctgtctttaaaaaaaaaagagatgggggctgggcgcagtggctcacacctgtaatcccagcactttgggaggccgaggtgggggtatcacctgaggtcaggagttcaagaccagccttgccaacatggtgaaaccccatctctactaaaaatacaaaaattagccgggcatggtggcacatgcctgtaatcccagctactcgggaggctgaggcagaagaatcgcttgaatccgggcggcggaggttgtagtgagcaaagatcacgccactgcactccagcctgggtgacagagtgagactccgtctcaaaataaaaatcagccaagcgtggtggtgcatgcctgtaatcccagctactcgggaggctgaggcaggagaatagcttgaacccaggaggtggagattgcagtgagccgagatcatgccactgcactccagcctgggcgacagagcaggactctgtcttaaaaaaaaagagatgggggctgggcgcagtggctcacacctgtaatcccagcactttgggaggccgaggtggggggtatcacctgaggtcaggagttcaagaccagccttgccaacatggcgaaaccccatctctactaaaaatacaaaaattagctaggcatggtggtaggtgcctgttatcccagctacttgggaggctgaggcaggagaatcacttgaaccaaggaggcagaggttgcagtgagccaagattatgccactgcactacaacctgggcaacaaagtaagactctgtctaaaaaaataaataaataaatagg[140 bp omitted]gcatggtggcagacgcctctagtcccagctactcgggaggctgaggcaggagaatggcgtgaacccgggaggtggagcttgcggtgagccaagatcacaccactgcactccagcctgggcaacagagctagactctgtctcaaaaataaataaataaataaaataataataaaatggggttatttgttttttgcttgttgcattgtttaagtcccttatagactgaattcctctttatgtctctaaatacatttgtctctttggtacacatctgcggtgctacatgccctcaacccaccaggttttagcatagctgttgtggtagacagttccgtgtgcagtgcagatagccctggttcagcccagctgttctcaaaatgtggtccctgaccaggtgtagtggctcacacctgtaatcacaacactttgggaggcctgggagggaggattgcctgaggccaagagttcaagaccagcctgggcagcatattgagaccctgtctctacaagaaattttaaaaattagctggatatggcgatgcatgcctgtagtctcagttactctggagcctgaggtgggaggattgcttgagcccaggaatttgaggttgcagtcaattatgattgcaccaatgtactgggtgacaaagcaagaccctgtctcaaaaaaaaaagtatggtctttgaaaagtcacattagcatcacctgggtactcgttaaaaatgcaaatgtttgggtcccacctcagacccactgaaccagaaactctgaggttgggacctggagatctatggtgcccccgggtgatcctggtgggctgcactgcaaggacacctggcctggctcctgcaaggcaaggcatccctctctgcttttctttctttctttctttcttttaaagacagagtctcactctgtcacccaggctggagtgcaatggctggatctcagatcactacaatctccacctcccgggttcaagcaattctcttgcctcagcctcccgagtagctgggattacgggcgtccgccaccacacccggctaatttttgtatttttagtagagacggggtttctccatgttggccaggctggtctccaacgcctgatctcaaaagatccgcccgccttggcctcccaacgagccgggattacaggcgtgagccaccgcccccggctgtcagtgtgtcttgaggtctttccctaatcccagatggcacaagttttccctcttgcaggcagagaaaggagccttgggaaggagcccctctggcctgaaagatcaagcctattgctgggcatggccaggtaaggaaactccaaccgtggaaaggacattccagggaggtggtgctgagataaggggggcagaaagagacaggtttggggggccagtggctctggaatgaagcgctacactcaaggctaggaatagttactgaatgcacatacacacataccattctcacagcccaggtgctgcgtcttagagcgtgtgagtgtgtatgtgtgtgtctgtgtgtgcgcgcgcacgcacgtctctatctctgtttctgtctttctctgacttgtccttatctcttgtctctccatcactctctgtgtctcgctgtctctgtgcatttccatgtctcgaatatgtgtgtgtttcaatctgtctctctgcctctttccattttctcctctctatccatcaatctaagcctgcccatctttttgtctgcctttctgtatctccgttcttctctgtctctctgtctcagtctctctgtatccagggattctctttcccagcagcgccagtgcgactccatgggaggtggggccggggcgcgtctttgagagaaggggcgggtgcctacgcctttaagcgcgggtgcgcgcggagcctgcgcctttaagcgccggtgcgcgcgctgccctgggttgccggcgaggaggccgcgggagcgcctggacccggcccgcccagcccggcccccgcccggcccccgcctcggccccggcgggggaggggtctctgagcgcggcccctcccccctgcgcccccgcctgcgctgcggtgcccccatcccgcgtgtcccagtctgtctgaccgtccctccgctcccaggcctcgccccacccggccctggggctgcccggtcgcccccctccccaccgcagccggtcccctccctcccagtcagcctccgccgcagcccaggaagccagccgggacgccgccgccccggaccccgcgccctaacctccacctcgggggcctgcacccccagattgaatcgggaattccggaaacccgagcctggaaccctgatctgggaccagcaccccgagatccggccgtggaaccccaagatctggagcctgaaccccagtatatggggctggaatctcaacatcggtcactgggacctcaatatttggagccggaaccccacaatttggaacacagaccccaatatttggagcagaaccccaagatttgacatctaaaacctcaagcctggagctgaactctgaattctgggcctgggaccttgaaatctgggactggatttccagtactgtaccctggaacccactcttggggacctgaaccctgggattcaggcctcaaattccaagatctggactgtgggattccaaggggcctgaacccgagtttgggcctgaagtccttgctgcagacctgagtgcttaaatctggggcttgagacctcccaatcttgactcagcaccccaatatctgaatgcagaaccccgggatcggatctcagactctaaaccccaccgtttggctgcttagcatcccaagactggacctgggagaccctgaccctgaacaacccaaactggacccgtaaaactggaccctagaggcccaatatttaggggtctggaaccccgagtattaaggtctggagactccgttgccacagatttgagccgagtcaggacacagtccctctacagaagccttggggacaggaaaagcatgaccagatgctccctccagagccctgacctctgactcccctggagctaggactctgctccctggggctgcttctagctcaggtaaggctgctgaaacctcaaggtggggacgggctgggaggagcattgtggctgcgggttacggtaccaggtaccctttgacactcttggggtttctccagaaaaaaagacattcccccatgggtctgccttcagctcctgctctgctccaaacactctctggacactggccatccttgcccctctctgaccttccctgcctcagttgatgggacctccaggtctctgacccctgcaacccttacagcctttcgctgtctatccggtccgaccgtctccgccacctctcttgtccaccactcctctctctgggctcctttctccacctgtcctctcaatggccatctctgttccctttttctctctctgatcatctttgtgacacccctgtccacaggtcctctctccagtcgcctctgcctgctgcttctcagtgaccatcgctgacatctgtgtccactgtgcctctctctaatcatcattcaccagctctcttgctccttctccacccctgaatctaagcctaggtctgtgaccgtccccatccatctttgacattgctgtccaccactcttctctccagcagcctctgtccatctctcctctctagcttcctctggccacctttccctttctctggccatctctcccactgctcttgccctcctcccacccctgaccctaactcccagtctgcaactgtctgaccatctctggccacctctcctctctctctcactcactgatgccctctgatcatctctggccacctcttctctctctctcactcattgatgccctcttgatcatctctggccacctcttctctctttctcactcactgatgccctcttgatcatctctgcccacctcttttctctcgctcgctgatgccctctgatcatctctggccacctcttctctctctctcactcactgatgccctctgataatctctggccacctctcctctctcacttgctgatgccctctgatcatctcgaacatctctgctgcctttcctctctccgatgacctctccccgcaccatcctcctgagcagctgtcctgggctcccactgactctgccatgtctgtccttttcctcctctctgaccaccttgctggctttgggccgtttctgaccacgtgtctctgacatggtcatctcccccagatctgagcccaacccatgccctcccttctctttgtccactgctcatcttcctgaccatctgtaaccccttctcttctctggtcatatctgaccacttctgatcattgttgccaccctggctgccccgtctccccatggccagcttttaccatctctgaccacgtctaaagccctctggttttcctgccactcacccagaccagctgtcatttctctgaccatttctttacttttttcttttggagagacagagtcacgctctgttgcccaggctggagtgtggtggcgcaatcatagctcactgcagcctcaaattcttgggctcaaattgatcctcccacctcagtgtcccatgtagctaggaccacaggtgggcgccaccatgcctagctaatttttaaaaatttttgtataatagatacacggtctcactttgttgcccaggctggtcttgaactcctggcctcaagccatcctcctgcctcagcctccccaaatgctgggattacatgtgtgagccaccgcgcctggccttcctctggcttttggtcacatctgacggtctttgaccagcccttctgccctcagcccactgtgaccttctctcctggtctcagaccacccccagcccctgcagaacccctcttctgccctcacgcctcccctcttctccgcaggacacccctgcccgcgatggccatcctcccgttgctcctgtgcctgctgccgctggcccctgcctcatccccaccccagtcagccacacccagcccatgtccccgccgctgccgctgccagacacagtcgctgcccctaagcgtgctgtgcccaggggcaggcctcctgttcgtgccaccctcgctggaccgccgggcagccgagctgcggctggcagacaacttcatcgcctccgtgcgccgccgcgacctggccaacatgacaggcctgctgcatctgagcctgtcgcggaacaccatccgccacgtggctgccggcgccttcgccgacctgcgggccctgcgtgccctgcacctggatggcaaccggctgacctcactgggcgagggccagctgcgcggcctggtcaacttgcgccacctcatcctcagcaacaaccagctggcagcgctggcggccggcgccctggatgattgtgccgagacactggaggacctcgacctctcctacaacaacctcgagcagctgccctgggaggccctgggccgcctgggcaacgtcaacacgttgggcctcgaccacaacctgctggcttctgtgcccgccggcgctttttcccgcctgcacaagctggcccggctggacatgacctccaaccgcctgaccacaatcccacccgacccactcttctcccgcctgcccctgctcgccaggccccggggctcgcccgcctctgccctggtgctggcctttggcgggaaccccctgcactgcaactgcgagctggtgtggctgcgtcgcctggcgcgggaggacgacctcgaggcctgcgcgtccccacctgctctgggcggccgctacttctgggcggtgggcgaggaggagtttgtctgcgagccgcccgtggtgactcaccgctcaccacctctggctgtgcccgcaggtcggccggctgccctgcgctgccgggcagtgggggacccagagccccgtgtgcgttgggtgtcaccccagggccggctgctaggcaactcaagccgtgcccgcgccttccccaatgggacgctggagctgctggtcaccgagccgggtgatggtggcatcttcacctgcattgcggccaatgcagctggcgaggccacagctgctgtggagctgactgtgggtcccccaccacctcctcagctagccaacagcaccagctgtgaccccccgcgggacggggatcctgatgctctcaccccaccctccgctgcctctgcttctgccaaggtggccgacactgggccccctaccgaccgtggcgtccaggtgactgagcacggggccacagctgctcttgtccagtggccggatcagcggcctatcccgggcatccgcatgtaccagatccagtacaacagctcggctgatgacatcctcgtctacaggtgcagggtccaggcactggggtagcttgggtgggggagtgaggcaaggggagggttgagggtacacctactaataccctacaccgaagcacaactgataagtgatgctggaaggttccaaaagaaatcagagagcaaaagtaaaagaaatcaggcagcaaggataacaagactctggcagaaagggtcaatgaaatctgacagcagtgataaaaagaagtcagacaagaaggacgaagtaaatgagacagcaaatgttaaaatatatcaggctacagggctaaaaaagatcaagcaataaggataaacgaaatcaggctgcatgagtaaaaagaaattaggcagcaagaataaatagtagtagcaaacataaaaaggaaaccaggcagcgggaggagaaagtaatcagggcagaagaataaaatgttaatgggcaagggtgggtggggaagataaggggataaaaataaatttaagttgtaaagataaagagagaaacaccaggttttccagatgacaggactagatactagctgggctgcaggaagaaaaggagatcaaacaggaaagcacagggagcccagaaacaatgaaataagcagctctgttagaaaaagaaatcagaccagaggttagaaggaaattgcagggaggaggttcgatagagactgggcttcggtgtgtgtggtgtgaactattccatgtttcaagttctaatatagtgacatccagatttttttttttttgagacagggtctcactttgtcgcccaggctggagtgcagtggtgcaatctcggctcactacaacctccacttcccgggttcaagcgattcttgtgcctcagcctctcgagtagctgggattacagacgtgcaccagcacgcccagctaatgtttgcattttatttttagtggagacggggttttgc[135 bp omitted]agtctcactctgttgcccaggctggagtgcagtggcacaatcttgactcactgcaagctccgcctcccaggttcatgccattctcctgcctcagcctcccgagtagctgggactacaggcgcccgtcaccatgcccggctaattttttgtatttctagtagagatggggtttcaccatgttagccaggatggtctcgatctcctgacatcgtgatccacccgcctcggcctcccaaagtgctaggattacaggcctgagccaccgcgcccgacagattttttattttctaaatcaaatcaaacctagttcaagttccttttgccaggtaaacagaaatatccagtttgccacacttgtgggggattctcttctctctcctgttgttgcaaacacagaacctggggtttacacactccaagaggtggctcagtccaacttgttcccccaagctggagagcactcagcacatctgcagtgaccgcatgtggtcagcagtggtggctgctgacctaggtgctgttgacacctcttaccaaagtccaaccttgcatggatggactgcggctgtgggtgagtccctgtcctcacggccaggctgggccaagggtgcagccccaaggctgactgtaaagactggacctccccagggttgaggactgttccttggggacctagtagtacctggatgtcctttccctcccttggggccaacacctcaagaaaaggccacttgatttccatttcagtcctggcaacccactgagctcattctactccctttctcagacatgactcggaagattgcacggaagtcctgcccctgaaaatcacacaagtcggccaggcgcggtggcttaacccctataatcccagcactttgggaggccgaggcaggtggatcaccaggtcaggagtttgagaccatcctggctaacacggtgaaacctcgtctctactaaaaatacaaaaaattagctgagtgtggtggcacgcgcctgtagtcccagctactcaggaggctgaggcaggagaattgcttgaacctgggaggcggaggttgcagtgagccgaggctgtgccactgcactccagcctgggtgacagagtgagactccgtctcaaaaaaaaaaaaaaaaagtcacacaagtcctggccaccttgccaggtggggaatgggatgaatgctgtcctagacagtcaccctgccccaggcggccacggagttccctgtacctctctcattagaatagcctaggaataaaacaggtgataagtcaactctccaacagggtgcccaactacaaaagaaactatagtgaaattgggtggtaaggattaaaaggaaacaagaaagaaaaagataaatagaaaccagccaacagagataaaagagaagcaggtgacagagccggaaagaaataaggcaacagggagaaaaagaaagcagtagtgacggaggcacattagtttaatgaaaagggaatcagacgacaggactcattggaaaacaggctatcaatacagtcatcataataaggcaatagggctagggggacatttattggcaggttacaaggaaatcgggcaacaggggtacagggagatcaggtggtttgattggagagaatcctagctgtacactagaggaaaatcaggcagctggaaaagggaaatttggcataggctgcaggaaataggggaaccagagggaaattggcaagcgtctggaggagactgggaggtaaaatgtgggggaaattggatgggggtggctagaagacaaaaggattaaattagatggaaattggacagggttagagcagaattgggtggtgaactggagagatgactggcagtgggaccagagtgaaatcaggcagaggattggggcaaaattgggcagggaggctagagcggagctgggctgcaggctggagggaaattgagtgggcagtgcaaaagggaaattgggcagttgggtataaaatgaaaccggcaaggtgtggtggctcacgcctgtaatcccaacacttaaggaggccaaggcaggaggctggactgccttgaggccaggagtttgagaccagcctgggcaatatagcaagagcctgtctctacaaaaaatttaaaaattagctgggcatggtagtgcacacctgtagttcctgctactcaggaggctgaggccggaggatggcttgagtccaggagtcagaggctgcagtgagctgtgatcatgccactgcactccagcttgggcaacagagcaagaccctgtctataagaaaacagaaagaaagaaagaaaagaaacaggatggattggaagaactcacgtggtgagctgttagagaaattgggtggtgggactagagtgaaaatgggcagcaggctatgaggacgtgtgagagggtgggctagagtgaaattggccaacagactggaggggtatcagtcaggtggctgaatgggatgtcagaccaaagggaattgggatgttggtgagagggagctcattgggtagaatgaaatgaaggagtggactggtgggaagtctagccccgcagggagtttggtgggggaagcacaggttgggggctgggcagcctgagacctgacccccacctgcctgccctgcaggatgatcccggcggagagccgctcgttcctgctgacggacctggcgtcaggccggacctacgatctgtgcgtgctcgccgtgtatgaggacagcgccacggggctcacggccacgcggcctgtgggctgcgcccgcttctccaccgaacctgcgctgcggccatgcggggcgccgcacgctcccttcctgggcggcacgatgatcatcgcgctgggcggcgtcatcgtagcctcggtactggtcttcatcttcgtgctgctaatgcgctacaaggtgcacggcggccagccccccggcaaggccaagattcccgcgcctgttagcagcgtttgctcccagaccaacggcgccctgggccccacgcccacgcccgccccgcccgccccggagcccgcggcgctcagggcccacaccgtggtccagctggactgcgagccctgggggcccggccacgaacctgtgggaccctagccaggcgcccccccctctaagggtcctctggccccacggacagcaggacccggacaccctgtgggacctggcctcaaactcaccaaatcgctcatggtttttaaaactctgatggggagggtgtcggggacaccggggcaaaacaagaaagtcctatttttccaagcttgggcgaagacccttgccctcgtctctgtctatgggggttgggggacggagcaggggtctggagctggggaatgcctcctttggggagacaccccctccccgcccagttcagtctgaggaccccggaggaggctgaggatggcgatccattcagacaatagatgttccctgcgtgtcggctctgagcatgccctgggttgggggatgctgtggtgatccagatagccctgagccctgcccgcaggggcctaaagtcaaatgggagacagacacatccccagacagtgatagcacagagtgaccagggatgtggggatgagggaagcctgggggattgtgacagtccagaagaggtacccttgctcagccccaggtgtggtcagggagggcttcctggaggaggacacatgtgatctgagaatgacatatgaaggagataactgggcaaagagcagaaggaaagctctttcaggcagagggcacagcacaagcaaggtggtggtgtgccctgggcactgggggtgctatggtagaggtgaggcaggagggttgagcagggtctaggacctccaggctgaggagctcagactctggcctgatgataccagggagccatggagggttgtatgcaagggaggaatggggtcagtttggggcttcaggaagatccttctagtgctatgagtagggtggacccaaggggaagactgaagctgggagccccaggggaagctggggcagggacctgggtgggtgaggacgaagttggaccagctgggctagggaacaagaaaagggagtgggttgacagagacactcgggaaactgtgggaagctgaggcggtgggttatggagctgcggggccatggggtggggcaggaagatggtggggactgccctcatataggaccagggaggaggagcaggtttgggaaagatgatatggccagtggggaacttggtaggtgtagggggccctgaggatgtccaggatgtggcattcaggagggtgcaggacccctggtctgaggctgaagctggaaatagaaatgagggctttgtcagcagagatgggaactgacgctgctggggttaagacggcttcttgtgggggatgattccaagtccccactatgggacattttttcttttttcttttttttttttacagatggggtctcactatattgcccaggctgatcccaaactggcctcaagtgatcctcccgtctcagcctcctgaattgctgggattacaggcatgagccactgcccctggctagggactttccatatttaagggtgacgcaaagaaaaacctaaccaagactaaacaggaccagcaggcagagggacagggggaagaagaccaagcaattcagacccaagaaactcttgtgttcaatgatataaataaaggctgcggtgaccccccagagagcagtgttagggggtcagttggggcagatggcagattcagctgatttgagaggagggggtaagaaaatgtagctagagggtgcagcccctgtcaacctgtgggcctggagtcccatgtctttgcagggtgggtccttactctgtcttgggcagccctaggccccatgagacaccaagcctggaggtttgcagaaccaaaccccggtctaggagatgttgagcctccttggagatccaggaacggggttggcagtaagaggaatagcaccccctgaactcagggcttcactaatgatgtccccagaggcaggagagtggagggaagctgggtcctgtcacctggagggacactggtgtgagggcatggtaaagagagcccaagactgaactggcccttttcatgacctggggcacatgattgtgacctcgtgggatgacatatcctagattctgccacagcttttctggggggtctaggccttgaacatgttatgccatgagtcatgggaccagcctgagtcctgggggacctcgtctgaccacaccctactccccaagtccccagcagtatcatgagatccttcttgttgtttgttagccttggacagctgaagtcaggtgacgtcatcaagaagagtgagggcatgagtcctggggaaaggggcctaggagcaggggcatagtgtttcgagactgtggtcccagctactcgagaggctaaggtgggaggattgcttgagcccaggagttcgaggctgcagtgagctaggattgcgccactgcactgagcccaggagttcgaggctgcagtgagctaggattgcgccactgcactccagcctgggccacagaacgacaccctgtctccaaaaaaacagaaaaggagcctaggaagtgaggatgctgggggcctagtgctggctacaattaccagttgctcccatgagggggagccagagggcactgttcgtgtgtgtgtgtgtgtgtgtgtgtgtgtgtgtgtgtgtgtgtcgaagtctcttgtcgcctaggctggagtgcaatggcgcgatctccgctcactgcaacccccgcctcctgggttgaagcgattctcctgcct[450 bp omitted]ccacacccagctaatttttgtatttttgtagagatgggggtctcactgtgttcccatactggtcttgagctcctgacctcaagtggtcctcccaccttggcctcccacagtgctgggattacagatctgaccgtagatgttatataatcacaccagcaagtgtaagcatctgcagtgaccaaggggcgccatgcaggagacacatacagaagtgcgcgaccctgtaaccaggggccctgacccaacaagagagattgaggaaggcttcctggaggaggggaggcctggcggagacctgaaggatgcgcaggttggagttaaccatgaaaggggtgggaagggtattccgtgcaaatggaagagcctgtgctgagggaagcatgagtgaaagagctgaggccagggggctgaagtaggggagggaagggaagagagtgaccttgggttgaggctggaaagcaggaagggagccgatgacgcaggaccccgtaggctgctgggaggagtgtggattgtcctctaagtggcatgagaagccattgaagggttttttggttttttttttttttgagacggagtctcgctgtcgcccaggctagagtgcagtggcacaatcttggctcactgcaacctccgctacccgggttcaagtgattcttctgcctcagcttcccgagtagctgagattacaggtgccctgccacgacgcccagctaatttttgtatttttagtagagacttcttcaccatgttggccaggctggtctcgaactcctgacctcatgatctacctgcctcggcctcttaaagtgttgggattacaggcggcatgagccaccccgcctggcccattgaagggttttgaggtctaatgagagtagcagtccctgatctcaaggaagctctgtggggaggaggatactgcaatagtccaagcagaagggtgatccggaccaagttggggcctgaagtggttgaagagagatttgagacgaccttactagaggcctctgccccccacccagcagacagtgtgccctactgtacagctacccagttctgcagcaagattgcagagatgggaagaagagttgtaagacactgggctctgatatccacagctccaccccttagatgggggagggacttctgtgtagcatgggaatgacggaccttttccaggctcaagtagcaggcagacagtggatggaggctgagaggcagtgggtggtcagggggaatgtggacacaggaaatgcagggctggaagggggacacacacttggtagtagcttattacaaatatggaagcaggaaggatgggaggagggcagactggtccctctagcatgggtcccccatgttcccccacagcatgcctggaccacccccacccgcctgcagaaacacacaatcacatgtgtctaggatttaaagttaaaattttgcttgtcagctaggcacagtggctcatgcctgtaatcccagtgctttgagaggccaccctcagggaggattgcttgagcccaggagttcaagaccagcctgttttcaactccgtggaccctgtgaggcacacttcactctccccagccctctggataaaacagtagttccttaggaactttaacttcccccaaaatgctgtggcctcccaggcaacatagccataccccatctctacaaataataataataattagcttgtccaactgcctagctaagtccatcaatttcctgagctcagggagtacaactacttctactgtcaattcctcatcaattcctcatctgcttttggccccacacattttttagaccaaagctccggctgctggagcattatcttgaagtgactgtagacccaataccaggattctgccctgtctgtgtactgccagatccaacccatgtgtcttggggtggctaaatctgacaaaggccctgagtgtctggggacacctgtgatctcctgcaaggctgaggctaatgccacgcttttgcagctctttgcatgggcacatatgtgagagaatcagataaaaggtgttcccaaaaaggatgtttgtgttcagggtggaacctgacgcctgcctcctgcctttgggtcctccctgatggctgtgccctctcatacctcgcaaaagcaaagataggtatcagtgctgcctgtcgtcctgacctgtgcggagtgacgttgggaacattgtggtgaccaacacagccctagcccttgccctcagagttccagttcaaggctgggagcagtggctcatgcctgtaatcccaacactttgggaggccgaggcaggtgggtcacttgaggtcaggagttcgcaaccagcctggccgacatggtgaaaccccaactctactaaaaatacaaaaattatccgggtgtgatggcaggcacctataatcccagctacctgggaggctgaggcaggagaatcacttgaacccgggaggcagaggttgcagtgagccaagattgggccactgtagtctagcctgggcaacagagcgagactccgtcccaaaacaaaccaacaaaaaagagttctatttccagtggaggaaatagataatcacaaaacaatggcatcccagagtggtcggggatggggaaagaacaggcaagaatgatcagggcttttgcagaagcccaggggactcccagagccagagggttctacacttgatcttagccaaaaggccaagaagcaatctgaagtttctaactgggcctgggatgggaggtggggagacagtccaagatttcctgaggcagggccagctttatggcagtgtgactgtggggttgcaccatgccccaaacttagaagtaccctatgcttgctttaatgccctagtgtcactatcttgaaattaataatttttgaacaagggccccacattttgattttgcactgcgccctgcaaattatgtagccagtcctgcccggaggagcgaacacttgagggatttacagagagagccgaggcagagagggtcttcccaggagagagagcattgggtacaaaagccaagagagggccaggcgcagtggctcatgcctgtaatcccagcactttgggaggctgaagcgggcgaatcacctgaggtcaggagttcaaaaccagcctggcaaacatggcgaaaacccgtctctactaaaaatacaaagaattacctggacgtggtgtcaggaacctgtaatcccagctacttgggaggctgaggcaggagaatcgcttgaacttggaaggcagaggttgcagtgagcccagatcctgccaccgcacactagcctgggtgacagagtgagattccgtctcaaaaaaaaaaaaaaagaaaaaagagaggactgcacactcaaagaatgagccagagttcagtgtggctggcgcaccatgggagaagggcgcactgtggggccatggagggtggagggtgataaggtggagggacagggtcaggtttgcactttagaaaaatccatctggcagctgggcgcagtaactcacacctgtaatcccagcactttgggaggccaagacgggcggatcacctgaggtcgggagttcgagaccagcctgaccaacatggagaaaccctgtctctactaaaaacacaaaattagctgggcgtggtggcacatacctgtaatcccagctactcgggaggctgaggcaggagaatcgcttgaacccaggaggcggaggttgcggtgagccaagattgcaccattgcactccaacctgggcaacaagaatgaaactccatctcaaaaaaaaaaaaaaaaagaaagaaagaaagatccatctagctaccatggggagggtggatgggggcacaaggccagggagaagatgggggactcagctgcctgtggaaggagctgggagtgtgggtgattctgaggaggagaggccagcatgggcacgtttaccagaaccttgggtaatagacatcccagtgcaggagacgagctgggagaccccaaaaccacgggatgaacccagagcctcattttcacttgcaaatgtttaccgtgggtggcgggggatgcagaagggtaggttacagaatgtcactcactggtaagtacttgaaaatctttttatatgaaaactcgcatggatagactgatggaggtgaatgcaaaattggcaagaatttcgagtataaaatgtgagatttcaaaggactttcttctggatatgttctggcttcaactccatagacccccggggtgcacttcactctccccagccctctgggtaaaacagcagttccttgggaacttcctcttcagcttcccctaaatgctgtggcctcggggagctgggaatgagccccttcctgcctctgtactcacattcagggacatcgacccctaacacctgtttttcttctctgttggcaaccttcatatttcttttcttttctttctttttttttttttttttttttgagatgaagtcttgctgtgttgtccaggctggattgcaatggcgagatctcggctcaccacaacctccgcctccctggttcaagtgattctcatgcctcagcctcccgagtaggtgggactgcagacgtgtgccaccaagcctggctaatttttgtatttttagtagagacggggtttcaccatgctggccaggctggtctcaaactcctgaccttgtgatcctcccgcctcagcctcccaaagtgttgcaattacaggcctgagccacctcaccaggctacaacctccatatttccatcctcaaccccagcatctctcctaagtccagacctggcttacctcagtttcccggacccctcttcctggacatcccctggggcccctcacacccactggatcccacacccacctcggcttcttctcggacctatgcctccttctaggtcctgtctgggagagcaacccccatgcagcctcctgaatgtcccccacctccccttcctccctgccccggccccatcctgggctagttctggcctcacccatctgggtccttgcactgggctcctggcctcagtctcttctctggtccaggatcttcctaaagccaaaccctcctctgtataggcacccccatggctccccagggttcctgggacagtctgagctcctcagcctctagcatcccagcccttcccacgccatccctcttccccagctctgtttctagcacatatgtttgttccccacctcaggcaggaaggaaacactaaccacatcctctgcttgtgatgaaggaggatcttaagcaagtgacagatgaagctattgaaggaaagtgggttccagctgggcgtggtggctcatgcctgtaatccctgcactttgggaggccgagttggatagatcacttgaggccaggagttcgagaccagcctggccaacatggtgaaaccctgtctctactaaaaatacaaaaattacttgggcgtggtggcacgtgcctgtggttccagctaccccggaggctgaggcaggagaatcgcttgaacccaggaggcggaggttgtagtgagccgagatcgccccattgcactccagcctgggcaacagagtgagactctgtctcaagagaaaaaaaaagaaagaacatgggttccttcttgaatgctccccttattcctcccaccaaaggtaacgttctgggggagaaggaggcctgggtgcagctactagcatctgggggagaggcagttggtaactgtacccagggtcccttgcttctccatttctggagatccatccttgccctcctctccgagatcctcctagaaggctgtagctccattgttctcagcttctgggaagccgagaggacgttctgggaagaagaaagtgatgtataggccattgttttctcacgggaacctctgtccccaaatcctccagacctccacatccaggcacctggtgccctctcctgcctctgtctctggtcacttccacaatccaggagcccaggcgtctagcttcctccttcctcaggagttcaggtctgcagtcccctccttcctcaggcacagaagccccatctccactcccctccatcctcagaacacaggctcccggcccccttcct[137 bp omitted]cggtgaaaccctgtctctactaaaaatacaaaaaaattagccgggcctggtgacgggcgcctgtagtcccagctactccggaggctgaggcaggagaatggcctgaacccgggaggcggagcttgcagtgcgcggagattgcactactgcactccagcctgggccacagagcgagactccgtctcaaaaaataaaaataaaaaaaacttctctctcagcaggctcaggagtcctccccctccccgcactggccctgccacctcttttctaatttatctatttattttttattttttttgaggcagagtctcgctatgtcacccaggctggagtgcagtggcacaatctcagctcactgcaacctctgccaggttcaagcaattctcctgcctcagccttccaagtagctgggactacaggcacccgctaccacgccaggctaatttttttgtatttttagtagagatggggtttcaccgtcttagccaggatagtctcgatctcctgatctcgtgatccacccgcctcggcctcccaaagtgctaggattacaggcgtgagcaccgcgcctggccttacttttttatttttagagactgggcctcactctgtcacccaggccagagtccagtggcaccatctcagttcagtgcagccttgatctccctgggtcaagcaatcctcccacctcagcctcccaagtagctgggaccacaggtgtgtgccaccacacccggctgtgcccctcttgtcttaggatggtcttcaggtctcagcttctccaccttgccccttcaatcccttattctgtctgagaaacttacatccctcactctctccaaatacaaccacttcctcaatattcaaagggcttcttccgatgctgggcacggtggctcacgcctgtaatcacagcactttgggaggctgaggaggagggtggatcacctgaagtcaggagttcgagactagcctggccaacatgtgaaaccccgtctctactaaaaatacaaaaattagctgagcatggtggcacctgcctgtagtctcagctacttggaaagctgaggcaggagaattgcttgaacccaggaggcggaggttgcagtcagccaggattatgccactgcactccagcctgggcaacagagcgagattccatctcaaaaaaaaaaggtcctggcgtggtggctcacacctatattcctagcactttgggaggccgaggtgggcagatcacctgaggtcaggagttcgagaccagcctgaccaatatggagaaaccccatctctactaaaaatacaaaattagccaggcatcgtgatgcatgcctgtaattccagctactcgggaggctgaggcaggagaatcgtttgaacccgggaggcagaggttggggtgagccgagattgcaccattgcacactccagcctggtcaacaagagcgaaactccgtctaaaaaaaaaaaaaaaaaaaaaaaggctttcctggaataaattactttcttgtctgtctttggtcttttttttttttcagctttattgagatacaattcaatggatttgagtatattcagagtcatgcaacctaacaccacaagctaactgcaggatattttcatcaccctgaaaagaaaccctacacccattaacagttaatccattccacctacagccagcctaggcaaccactaatctttctgcctattctggacacttcatatgaatggaatcatcacgtgatcttttgtgactggcttctttcacttaacgttttcaaggtttatccatgtttagcatatatcagtatatcagtccttctttcttttcactgccaaataatgtttatgggcctaggggtagaattgctaaatcacgcggcagctgtgtttcattagtttgaggaactgacagtctgtttcctgaagtggctgcaccattttacattcccaccaacaatgtatgagggttccaatttctgcacatcttcaccaacacttgttattatttctctttttaattacagccattctagtgaatgtgaagtgatatctcatagttttttgtttgcttgtttgttgttgttgttgttgtttggagacagagtctcactctgtcatccaggctggagtgcagtaggcacaatcacagctcactgcaacctccacttcctgggttcaagtgattctcctgcctcagcctcccgagtagctgaggctacaggcatgcaccaccacacctggttaatttttgcatttttagtagagatgaggtttcaccatgttggccaggctggtctctaactcctgatctcaaatgatccacctaccttggcctcctaaagtactgggattacaaacgcgagccattgtgcccggcctcatagtagttttgatttacacttccctaatgattgtgtccagcagcttttcatgtgcgaactggccatttgttagtgggttttgcttcttttaaaaactgctgagccatccataaacattttcaaaatgcagggtatgtttttcagtgttaaggcaactgttttgatgtgttttcctttgctctctatcaccaaatactgtacatacaaatagtaagactgggctttgtgttgtccattgttaatcctaaatgcaacaaaacacatggagactttgaaaatccttcagaataatgctatagttaagattttgctaaagcaagtgttttttctaactccttgagctgcatattgccttgagtaatcatcatccgaattgtatcctcttcggtggcacttttgtttcttttgaattcttcccttgcccaatccttcaggtatttgcgatcagaatcatttggaacttgctgaattgtttggaaaatccttctgtagaggagaagaacttgttgccttctgatgaactgctttaacattagtgttgctggggtaagcgggaagtggccatgtctgccagcagtccgccggagcctcagctggtctttttccttctctctttctccattccttaccctatctgtccctctcccctcgtccatctcttcatctcaccataacccttttttttttttttgaaacggagttttgctcaggctggagtgcaaaatctcagctcactgcaacctccacctccccggttcaagcaattctcctgcctcactctccagagtagctggagtagctgggattacaggtgcacgccaccacgcctggctaatttttgtgtccttagtagagatggggttttaccatgttggccaggctagtctcaaactcctgacctcagatgatccacttgcctcggccttcctaaatgctgggattacaggcgtgagccactgtgcctggccttcaccgtaacttttgtgtatctttccctctcccacatttactctctatgccgatctctgtccccacctccccatagctgtctttcctttctctgtcccctcctttctccacccagcacccccatacttaggcctctgtatgatcagtggcaccaggtcaggctggagccagtactaatgggtacatttgtgtgtagacccagggtgggtgctgagggccaggcccaggcacctaggactataaatgcccctgcaatgtggttggcctcagccctgctctggcaggtgacccccgggccctgggctctgaggctgagcccttctctgaggtctcccttgtgccccgtactgcccctgcagtgggaggcctggagggaaggctggcaggaggaaccacactaaccagtctatctccctctacccccagctgtgcctcggtgccttgggtttcctacagggtgagtgccccagaaggaacacagaaagctggtgagttggtctggatttgcagcagagtgtggggtagggaggggctggttgtgctggctcaggttgggaggctgtctggcatggctctgtgacaggggattggccacagtggaacttcttgggacagggccctggccagctggacaaggggctatttgggcagactgtgtgccaggagattggcaaaactggttctgaggaggctgggcgggccttttggggacagatggtgcaaaagaagcaagtttaagctaatattgatatagctgacttcatgccatggctttgacatcaagctccccatcattctgtgaagtgtgcaccgataccccctttacagacacagcagcttaagccccaagaaaggaggtgacttgcccaagttcacttggctagaaagtggccgagtcggctgggcaaggtggctcacgcctgtaagtaatcccagcactttgggaggccaaggtgggaggatcgcgtgagcctgggagaccagcttgggcaacagattgagtctcctctctaaaacagaaaaagaaaaggaaggaagggagggagagagggagggagagaaggagggagggagagagggagagaaagtggcagagtcagaattagaatctgacgcatttagcttccaaatccaccggattattcttgactgcctcctctgggctcctggttccctcaagcccgacggacgtctgtgttttatgtttccagggctgccgcttcatcacggctttctcggaaaacgggggcgctgagaagcccaacttccagctatatatgtcgccaccgcccacagggcccccgacggcgatgctggtgacagcgctccctgcgtgggcgccactctccccgtgctccccgcgcctgcagccaggcacgacggtgtgggtgtgcccgcccggggcagaggagctgcagggctcgcggcaggcggcgctgtgcaagcagcgacgtcgcggcccgaggaagtggaggcggtgaacgcgcgtgggcgcgcctcccgggacacggcgctggctctgcggcgctacctgctgggcactccctaatcgatggtgacgccgtcgctgccgcccggcgaccggcacaaggagtttgcggtggtggcgggcgctgggcccacgctcttgaggcgcctcaagccccctaagcctgttctgctggaccgcgtaggccaccctgcccgctggccccatccattgagccttgaaggcttccagaggcgctgcagttgcagagagcaggagacctatccggcacccgcgtcgtggccgcccatcctgtcgcgctgctggctggcctcagttgtctgcaagcgagaagcaaggcctgtggccacgcgtttggacgaccgccgccccagggtcgctggagtggtctccacacggtgccccactttgccccagagcgtcccgggcgccgagactgcgtgttcctggaggctagtggcccgggtagcctgtgctcctggtgctgcgacgccgaccgggcgtgcgtgggctctgcgccctggcacggtgctgcgctctgtggtggaccagtgcactctctggctttgcgctcttcggctggcgtgcaggtgtttttccccccgaggccgccgcggcccgcgggggttgacacctacgatccctccttcgcgcttatgccctggtgggcgcgttcagctgcagcttcgcaagcatggtgcagccaaacttttccaacgtggaatttgcacctgccccggtgctcccggactgcctgctgggcccgagccgcgtcatgagcagcattctgaccaaaggctggtcccggctcagggcttcgcctggactgaggtggcctaggggcgcaggtgcagggcagtgcaagacctgtagagaggcggggcgcccatgggcatgtttagcttcggcatcgcccaaggcgcaggcttcgggacccaggccgtagggcagccggcggcagatgagcagccctgagggcccaagggtttggggaggtgaaccggcaatgggattcgtggatattaggattggagaaaatcataacactacattccattgcttatataacaagagaggtagttttttttgtttttgtttttgtttttgtttggtggtttttttttgttgttgttgtttgttttggtttggttttgctttgcaccccacccgaccctcaatttttgtatttttactagagactgggtatcagcatgttggccaggctggtcttgagctcctgaccttaggtgatccacccgcctcggcttcccaaagagctgggattacaggcctgagccactgcgcccggcccagagaggtagttttaaaatacaagtctgtccctcctccactcaaaatctccttggcaattatcccatctcccagcaaaagcagtccttacagtggtttaagagttcctacatgatgtgttcccagcacactgctcatctcatctctctcccttgcctcactgtactccagccacactggttgccttactttcttcttcctaccccagggcctttgcactggctgtccccatgatatccctgtggatcactctctcccctccttcaagcctttgctcaaatgtcacctctccactgaggccaacctgactgcccaatttaaaattgcaatccccaggccagacatggtggttcacgcctgtaattcccaccactttgggatgccgaggtgggtgaatcacttgacaaggtcaggtgttcaagaccagcctggtcaacatggagaaacctcatctctaccaaaaaatataaaaattagccaggcgtggtggcacgtgcctgtaatcccagctactcgggaggctgaggcagaagaatcacttgaacccgggaggcagaggttgcagtgagcagagatggtgccactgcattccagcctaggcgacagaatgagactccgtctcaaaaataaaataaaattgtaatcccccacccccaacattacctagccctttcccagaattttttcacagaatatatcactttctgtataattactttttctattatctgtctacaacacatacattccttaagggcaatgattttttttaaccgtttaataacctttaaaaaaaaaaaagaaaactgaggcagagtctccctacgttgcccaggctgattttgaactcctgggctcaagggatcctcctgcctcagccccaccaaaatgctggaatttcaggtgtgagccaccgtgtttggcctgttgtcaagtttttgtttgtttgtttgttgttattttgtgatggagttttgctcttgttgctcaggctggagtgcaatggcataatctcggttcactgcaacctacgcctcccaggtccaagcaattctcctgcctcagccccccaagtagctggggttacaggcatgtgtcaacatgcctggctaattttttgtatttagtagagatggggcttcac[140 bp omitted]aatttaaagtttccaacctgaatgaattttcacatatgttcatctgtgtagccctcacttaaatgaagctattagaacacttctatcaccccacatagcttcatgaggtcagattcttacaaaaagattttgtgcactattaaatctccagcacctgtgacagtgcccagctctcagcaaacatttgtggaaggaatagtaatggttgtaatttgttaaatgtgcaccacatcatatgccaggcactgggctcatagaggcaattattgcccaaggtcatacctttttattacagtgtaaaatgtgaacagtggggtgggagaagggataaaataataatagctagtactgagtgcataactctgtgcattatttctttttaccttcccgcttgtctttgaggttgactatctaataatattgtgggtttttttgttcttttttttttttttttttttttttttttctgagaaggagtctccctctgtcgcccaggctggagtgcagtggcactatctcggctcactgcaacctcagcctcccaggttcaagcgattctcccgcctcagcctcccgagtagctgggattacaggtgcatgccactacgcccggctaatttttttagttttagtataaacagggttttgccatgttaaccaggctggtctcgaactcctgacctcaggtgatccacccaccttggcctcccaaagtgctggaattacaagcatgagccactgcgcctggcctgttttttgtttttgttttttcttttcttttttaagatagagtctcactttcttacctaggctggagtgcagtggcatgatctaggcttactgcaacctccgtctcccaggttcaagcgattcttgtgcctcagcctcctgagtagctgggattacagatgcgcagcaccaccacgcctggctaatatttttgtttgttttttttttttttttttttagtagagacagggtttcaccacgttggccaggctggtctcgaacttctgacctcagatgatctgtccacctcagcctcccaaagtgctgggattataggtgtgagccactgtgcccggccaatttattttgttttgtttgagacagggtccttttctttcacccaggctgctgtgcagtggcgcaaccgtggttcactacagccttgacctctgggctcaaatgatcctctagcctcagcctcccaagtacctgggactacaggcgtgcaccaccatgcctagctaatttttattttttgtacagacagggtcttgctatattgcccaggctggcctcaaattcctgggatcaagcaattcacctgcctcagcctcccagactgttgggattacaagtgaaaaccaccaccctcagcctataataatattgtaacgattgcttttccctggggagaggggccgagaccagagctcaagtctcttgccaagctcacacagctagaaagtggcagtgtctggatttgaacccaggtctgtctgtgtccacagtgcaagcttttaaccacctttttggttgtggggggtgttgttttgttttgtgttttgtaccaccttgcaaagacttataaagtagtctagacttatgtgctaagtggcaagtgcttttataaataatgtacatacattatataatgttctctttacagtcatcctggagatgggtctttttgttatcctcatttcatagagaagacagttgaaggtttaagccatgaaatcactgcccaaggccacatgctgaacagatgtcagctttgaaccccaagcctgcttgggctgctgggaaacaggcatgttgtctcagagggcaccgcgctcggcgaagactcagcgagactggacgctgaccatggttctgaacacactgtgctgcgggacctgggcttttcctgtaaccctgaaatcccattcaacctcttacggtcctgagaaacaacggaagaccagggagatgagagaaaagtgagggaatgctgagagagagaggctgggtttcttagaaatgaagacaaggacttcaattcatttatttataacagctcagagctggactctggagccaagagtcctggatgcaaatcctgctccaagctgtgtgattctgcataagtcaattcatttctctgactatctacttcccctctattaaaggtggataatagtatgaacatcataaggttgttgtggcattttaaattaaattatttattattcctattattatttaatagaaatagagatggggtcttgctatgttgccaggctggtctcaaactcctgggcttaagcaatccacccaccttgacctaccaacacacttggattacaggcatgagccactgcacctggctctaattttttatgtttatttatttattattattattatttttgatatggagtctcactctgtcgcccaggctgtagtgcagtggcgcaacctcggctcactgcaacctccgcctcccaggttcaagcaatctttccacttcagcttctctagtagctggaactacaggtgcctgccatcactcctggctaatttttgtattctcagtagggatggggtttcatcatattggccaggctggtcttgaacgcctgacctcaagtaacccacctgcctcagcctcccaaagtgctgggatcacaggcatgagcaaccgcgcctggccttatttttattcatttatttatttatttatttatttatttatttatttattttgagatggagtttcattcttgttgcccaggctggagtgcaatggcaagatcttggctcactacacctccacctcccaggttcaagtgattctcctgcctcaacctcccaagtagctgggactacaggcacaggccagcacacccacctaatttttgtatttttagtagaaatggggtttccacatgttagccaggatggtcttgaactcctgacctcaggtgatctgcccatctcggccttctagagtgctgggattataggcatgagccaccacacccagccttttttttttaattaaaaaaaaaaagtagagatggggcctcaccatcttgcccaggctggtcttgaactcctgggcttgagtgatcctcctgtcttgacctcagaaagtgctgggagtacaggcgtgagccactgcaccctgccagcgttttttaaatgacttcatagaacactgtctggcatgcagtaaatatttgccagtattactttgcagcaatttttttttcattttcttcaggctaggcctgttctaggcactgcagatgcaacagtgaacaacacagacaacatccctgccctcagggagctgacactctagctcagtccatacgaaaactctatattccatctttttttttctatattccattgtgatagaaaatatgcaaagttctacagaacacaagattattcttaaaagttcactttggggtcaggtgtggcggctcatgcctgtaatcccagcactttcggaggccgaggtgggcagatcaccggaggtcagagttcgagaccaacctgagcaacatggcaaaacctcatttctactaaaaatacaaaaatcagccagatgtggtggtgcatgtctgtaatcccagctacttaggaggctgaggcatgagaatctcttgaacccgggaggtggagtctgcagtgagctgagatcacaccactgcactccagcctgggtgacagagtgagactctgtctcaaaaaaaaaaaaaaagttcactttgtaggtggctagcttcgtgcactgatagcaatgaataaataacatcccttcctgggaagaaggaaggaatatatgtctccagttccccacagcatacacacatgcgcacgcacacacgcgcacacacacacacacacactctcacatcctaccctcaagtctgcttaatgtggcaagttgaagtcctcgatggccagaatcaatgcaccatacatttgcactggcatagagatgctcacataattgaatctggctgtcttcagatgcagcctgtgctctcgagctccctacagacctattctacacccaggccgtgctgatcattttgtccctcagtcccactcttttctttctgctgatacatacagacccagtttattttaaattgggaacactgatagcttctgaatgttgagtttccagtgccagggaccctggaggcccggggtatgaaggcaggtcggggatgaggctaaattccaggatccaattatattgcatccttccctcatctcatctctaaatattttgactgaggaggaagtgagccctttcatagagtcccatcccctcctagtcttccctggtgatgccactccagttccaggtctcctgtgagggccatacatgctctgatgggaccacatgtcagcttgtgaagcacagacttaagtgtgtggctgggcacagtggctcacacttgtaatcccagcactttggaaggcagagatgggtggatcacttaagctcaggagttggagaccaccatgggcaaaatggcaaaaccctgactctacaagaaatacaaaaattagccaggtggcatgcacctgtagtcccagctacttaggaggctgaggtgggaagatggcttgagtccaggaggtggaggttgcagtgagctgagatcgcaccactgcacctcagcctgggcaacagagccagaccctgcctcaaaataaaaaagaaaaagaaaaaagaaaaaaacaaaaaacaaaaaagtaatttaaaatctaaataaataaataaatgaaaaaggcctaaatgtgtgcccaccactcaggtcacatgtgagtctgagaccttgtccagttccaagatggcaggactccaaaacaccgtccatcttcagctctaagaccatggcagtggctgcatcaggaccaaacaacacacctgaagctgagccaaggcttgtgcctgtgctcctggggggacctgagcctgaacctgtggccatggctcatctggggcttgcacaagtgaccgtaaatgaaccctgccctgaacctgtagctgcagccgcaccagtgcctcgacttgtgactgtgaaagaaccacttcctgcaactctggctgtagctgaaccagcacctataccacctaccaaacccatagctaaccattgtctacaaccatgtccaaaaccaagacagtatctgtgtctgggtcagaactgtctcatggccaagctggggctcaaggtggtgacagtgactaaaccaagcttaaagactctggctgtggcaaaattaggacttgactgtagcaaaggacaaggggccatcacaggggctaccacctgagcctctgggctaccatacatctagactttttttctttctttctttcttttttttttttttttgagaaggagttttgctcttgttgcccaggctggagtgcaatggcacgatctcggctcattgcaacctctacctcccgggtagaggttcaagcttgaaggttctaccttcaagcgattctcctgcctcagcctcctgagtagctgggattacaggcatgtgccattacaccaggctaattttgtatttttagtagagatggggtttctccatgttggacaggctggtcttgaactcccaacctcaggtgatccgcccacctcagccttccaaaatgctgggattacaggcatgagccaccgcacccggcctgatttctttttttttttaaagacagggtcgggcctggcgcagtggctcatgtctgtaatcccagcactttgggaggccgagatgggcggatcacaaggttagcagtttgagaccagctggccaataatggtgaaaccccgtttctactaaaaatacaaaaaaattagccaggcatggtggcgggtccctgtaatcccagctacttgggaggctgaggcaagagaattgcttgaattcgggaggtggaggttgcagtgagccgagattgcaccactgcacttccagcctggacgacagagcaagactccatctaaaaaaaaaaaaaaaaaaaaaaaaagacagggtcttgccgtcacccacactggagttcaatgtcacagtctcagctccctgtagcctctgtctcccaagctcaagcaattcgcttgcctcaacctcccgagtacctgggattacaggtgtgcaccaccacgcctggctaatttctgtatttttagagacggggtgtcaccatgttggccaggctggtccaaactcctggcctcaagcgatctgctcacctcagcctcctaaagtgccgggatcacagacgtgagccgtcgtgcctggccagtatacatctagattttcaatgaccacttgttccccatgcctgggatctgcacctacatgctgagctgatgcccctagtccctcctcagcagcctccctgcctcctaactgtgggtctcctgtcctgaagggaggcagcccatgtgctttgtcacagggtgcatctttggtattaccatcactgctgtcaagcacaagtgtggccctatccagataagaatcacagtgtatgggatcttgggagaccccatccttctctgttcatcaattttgggagctttttttctttttcgagacagggtcttgtttagtcacccaggctggagtgcaatggtgccatcatagctcactgtagcctcaatctcctgggctcaagtgatcctcccacctcagcctcccaagtagctaggaccacaggcacacactaccatgcctggctctttaaattgttttgaagagacagggtctcgctatattgtccaggctggtctcaaactcctggcctcaagcaatcttctgtcctcggcctcccaaagcactagaatcacaggcatgtgagccaccatgcctggcaggtcatttttgtcacctctaaaatagaagcaatgatataggctggggcggtggctcacatctgtaatcctagcgctttgggaggctgaggcaggcggatcacctgaggtcaggagttcgagaccagcctggccaacatggtgaaaccccgtctctactaaaaatacaaaaattagctgggcctggtggcgctcacctgtagtttcagctactagggaggctgaggtgggaggatcacttgaacccaagaggcagaggttgcagtgagcagagtgtgccagtgcactccagcctgagtgacagagcaagactgtctcaaagaaaaaaaaaattgtttaccgggcatagtggctcatgcccataatcccagcactttgggaggccaaggtgggcggatcacctaaggtcaggagttcgagaccagcctggccaacatggtgaaatcccatccctactaaaaacacaaaaattagctgggcatggtggcgggtgcctgtaatcccagctactggggatgctaaagaaggagaatcacttgaacctgggaggcagaagttgtagtgagctgagatcacgccaccgaactccagcctgggggacacagtgagagtctgtctcaaaaaaaaaaaaaaaaaaaaaaaaaaaaaaaaaaagatgcaattatacaggtccaaagtcccttatctaaaatgtctggggccaggtgcatttcagattttggaatttagaatggtcaaaccaggcaaatgccacatattatataacactcccagtgtgtgttacataatcacaaacattaatatctttgcagtgaaatgtctgaatagtcacacaaaggaggataaattaagactatagcagccacacatgagttcaggttagcttttgctgataattgagttttaacatcaaacacacaaaacatattcagtcttcaggtcttttggttgttgttgttgttgtttgcttttgtagatggtagataagggattgtggctctctagctcctccctcagcaggttcctgtgaggtgagaatgagttaacacaggaaaagcacttggaacagagtccaactcatggtaagtgtcatatgagggggtgtttgctgtgtttatcatttcctgacacaggcatatgaagcttccaaattccccgagctgtgaacatatcctaggaccacatgcagccactagcatgtcccaaatctctcctccaggaaggtttaggggctctgctctggttagaaggttgtgggggctagagtatgtttaatccgggttgctggctggggggacctgatgaaggttatgatgtactagtgtacccagaccaaaccgagggttgggctgcttattctcacagcctaataatgagacacaaataaactgggaaagaagagaatttttatttctgtaactgattacagggagaaggcctggaaattatccccagatcaactcaaaattataacgttttccagagcttatatacattctaggctatattagaagaaattaatcacttatgtctttagatgaatgcaaacttacatgagtaaatttacttcatctaaatgggtccaggtgctggggtgattacccttatcttgtctcctgctaaattatggaggcttggggagttcctttagtctccaataaagcttgtttgtgaaggtctggggagttccttcagacccccaataaagcttgtataatcttaaatgggaactgttaagaattccttcgtgaggctgggcatggtggctcatgcctgtaataccagcactttgggaggctgaggcgggaggatcacctgaggtcgggagttcgagaccagcctgaccaacacagagaaatcccatctctactaaaaatacaaaattagctgggcatggtggcgcatgcctgtaatcccagctactcgggaagctgaggcaagagaattgcttgaacctgggaggtggaggttgtggtgagctgagatcgcgccattgcactccagcctgggcaacaagagtgaaactctgtctcaaaaaaacaaaaaataaaggaattccttcatgatcttgtcatgcctcaagggccaggaaaggcctggcctaaactcttggtgagcttttgttacattccagcctttgtatggacgctggctctaccagcgttttttgttttgtttcttttttcttttttgagacggagtctcactctcttgtccaggctggagcacagtggcgccatctcaactcactgcaacctcctcctcccagattcaactctcccaggtagctgggattacaggtgtgcaccaccatgcccagctaattttttttgtatttttagtagagacggggctttactatattggccaggctggtctcgaactcccgacctcagatgatcctcctgcctcagcctcccaaagtgctgggcttacaggcgtgagccaccgctcctggcctctatcagcttttagtatttaacccaaccacagtcagtgctaaaacagttgttatggaggcctgcgttcatgagatgtggcttgccacactaggccacccctcagcaccactatagaaaaacaatggtggcctgggttcaaattccggtttggcacttgatatctatgtgaccttggataaattatttaacctctctgggcctcaatttcttcatatgtgaaatgagaatgatgaaaagatctgattcatagggctgtagtgaggattaaatgagctaatatatggaaagcacagaaaatatgcaaagctaggacccgagacgtgaagccatgatgctgcatacctgcctccacaccgcctgggagtttgccctgccactcaggggtcaggatgccccccagtgctcttaaggctccccagcatccagtagcccccaccccaggtatccagaaccttcagatactcagggctccagacttatactctcaccaacatgatccctcttttcccaaggacttgacactcctgtgttccttcctcaattaattggaattttagaattttttttttttttttgagactgagtctcactctgttgcccaggctggagtgcagtggtgagatcttggctcactgcaacctctgcctcccaggttcaagcaattgtcctgcctcagcctcccaagtagcctgggactacaggcacatgccaccacactcggataatttttgtgtttttagtagacacggggtttcac[140 bp omitted]actaacaacatccctgtggctgccagttgagaacagattacagggcttgtgaaggaatgaggcctggaggaacaacagtgaggaggctgctgcagtagtcccggcaggagacaatggggcttggaccagggtggggcagtgaacgcaggagaaatgtgggctggaaaccaccaagtgaggcaaaataaggaaatcatggactgggagaaaggaggtaccccttgatctggaaggacaggtggaggctcttggtaatgggggaagcccttgggtcctgtctgaaggctctcctgtttactggatgaggtgggcacacctggctccttggtaggattactcatctagattcctgagaagaggacttgcaagtattgtgttaggacaaatctggatattgaaatcaagactcccagtttaaaaaaaaaaaaaaagaaggccgggcacagtggctcacgcctgtaatcccaacactttgggaggccaaggcgggcggatcacgaggtcaggagttcaaaaccagcctgaccaacatggtgaaaccctgtctctactaaaactacaaaaattagcttggcatggtagtgcacgcctgtaatcccagctactcaggaggctgagagagcagaattgcttgaacctgggaggtggaggttgcagtgagccaagatctcgccactgcattccagcctgggagacagagcgagactctgtctcaaaaaaaaaaaaaaaaaaaaaaaagattcccggatagaggctgggcatggtggctcacatctacaatcccagcactttaggaggccaaggtgggcagactgcttgagctcaggagttccagaccagcctgggcaacatgacgaaacctcgtctctacttaaacacacacacacacacacacacacacacacacacacacacacacacacacacacagaaagattcttggttagctgggcacggtggctcacacctgtaatcacagcactttgggaggccaaggtgggcggatcacaaggtcaggagatcgagaccatcctggctagcacagtgaaaccctgtctctactaaaaatacaaaaaattacggggcgtggtggcaggcgcctgtagtcccagctactggggaggctgagacaggagaatggcgtgaacccaggagacggagcttgcagtgagccgagactgtgccactgcactccaacctgggcggcagggtgagactctgtctcgaaaaaaaaaaaaagaagaagaagaagaaaaagaaagattcttggttagtagacgagggtggggcatcctagatctgcaaaggccccactctcaatatcccagaatccaaccccctcaacctccttatcctccacccctccccgatgctcaggaattcagcccctctgaagaccccagctcttggtcactcctgcaggggaacccacagcagctggggctgtcagttatcctgggcgacagatggctatggttgtacttccacacctcagaaccatgggcagaggcaggtctggagcaagaaccgcccacactgcatctcttttacaaccggcagcacacacgtcactgcacgtggctgaaggttgccactcacacaaggcagactgtgcagtgacttcattcaggcaggaccatgacatgggcagtccagatccactggtcttcgtgcatttgggccccgcagccacctgataccctgagccaagccttagtccccacaggagactgggggccctgtgctgtccctgtagccccaaaggggccccttagccactgccaccaagtgtgacacctacacccttcgaggccagtgccgtgcctggatatgccccttccccagctccctgcctacgctttgggagtgcttccatgtctgtgtacaccctgtcaggcctcagtgtcaacactgagccctcgagcttctgggctggctgccgtgagtgacccttcaagggaaagggttataggctgctgggtaaaggggattctgggacttaggaatgacactccttagttctggaggctgattcctggggcaagggtgtagggtccctggaaggggacagcctctgggtcctgggggcaagactgctgagttggggggtgcggggaaaataattctagggcccagagacagggctctttgggtctggggccagggcttctgggtcctgggcatgggaacaacttggctatagggctgggactgctgggttctcaagttctagagactagaacacctaggtggtgacaactccagtatctggggtgagcgctctgagtcccagagccagacttatttatttatttagacaggatgtcactctgttgtttatttagacagggtatcactctgttgccaaggctggagtgcagtggtactatcatagctcactgcagcctcaacctcccaggctcaagccatcctccctcctcagcttcccaagtatctgggaccacgggcatgtgccactatgcccagataattttttaattttttttgtaaagatgaggtcttcctatgttgcccaggctggtctctaattcctgagctcaagtgatcctcccaccttggcctcccaaaatgctgggattacagatgtgagccactacgcctgtcccagagccagacttctatgttctggggagtggacttctggtttcttagcacagagacttctttactctgtgaggcagggattgctgggtctgttgcctggagagctccattctagagggtgaggaccacaggatgttggtagggattcctggaagctgagagcagggacatttgcactataggggtggccaaatgcttgggtcttggaaaccagacctgggagtcctggtgtgaatacctttcccttcctgtctttctccatccccactcctgcccctgcagctattgagtgccccgaaaacaatcactatgagccatgtggcttatcctgtccagagaccccccacaggcaggcccactgggggttaccactgccctgcgggcatacttgtgcctgcgacacaggctgcttcttccttttttaagagacagggtcctgccaggcgcggtggctcatgcccgtaatcccagcactttaggaggctgaggcaggcggataatctgaggtcaggagttcaagaccagcctgaccaatatgatgaaaccccatctctactaaaaatacaaaaattagttgggtgtggtggcaggtgcctataatcccagaatctagggaggctgagacaggagaatcgcttgaactcaggaggtggagattggagtgagccgagattgtgccactgcactccagcctgggcgacagagcaagactctgtcaaaaacaaaatcctagaatctcaagggcaagccccagtgtaccagaagtgtcagactctgggatcttggaacccagttctgagccaataattccatttcctcattcaacaaccatatattgagtatctactgtgttccaggcactatttgaagtgcttctttaagtatgttaactgaatttcagaacacactctcagtccaggtcctgggcacccccatataggatccaggagttctaaagtcccaatccccaatgtttacaaaccctcacagccccccaaatcctagatgccaaacacaactgctgtggacaacaacgatcagaaccatggacagcagttcaggcatttgtagctgctgtgggcccaccccctgcccagtaccagtcatcacagcaccctggaacccctgccattacttagaaagtccagcatccttggaatgcttatagaccagcatcacctatgaacctcattcatttattcattcatgcattagttcgacaaatatttattgagcaccaactatgagctgagaactgttctattttatacacgtgtgtgtgtgtgtgtgtgtgtgtatgtgtgtgtgtgtgtgtgtatgtatgtatttgagacagtctcactcttgcccaggctagaatgcagtggtgggaccgcggctcactgtagcctcaaccacttggacttaagcaatcctctcacctcttgcccctgtagcctctctagtagctgggactacaggtgcaagtcaatatgtatgttcattttttggaaagacagggtcttactgtgttgtccaggctggcctcgaactccaggattcaagcaattggcccgccttggcctcccaagttgctgagattaaagcatcacctactgcacccagcctattctgcacataaactatatcaattctaattgaggaaaactatagtcccaacctccagaatccataattcttacctctcaagatttgttgaaaagggtggtcaggatcatgaacagcagtccaagcatttctaggtttgtggacagacccccagcccctcaactggccccccagaacccctgctaaaagcaggggtccaggcatccttggtactgacactgggcccccaagctctagcttgacctgccctctccccgcaggtgaatggtgactgcaagaatctgcacttacaggctccaggcaacagtgcactcatcttctgccagggctgggacaccatggccagctgcccctttggcctgtgtgggacctacaccccgggatccatgcaacactgatgctaccagcagcaataggggcggggttaggtgctgactacactggggggtacctggatgcccagagttgaggcaagcaccaagctgcctgaggacatattggcttgggcctgtggctgcttggtgggctgtctgggtgtccaaatgcctctggcaagatgccatcatgaccaccatcctgtgccaccctgccaaccactagcaccctggcccactttgttcacatctatggcatcctcctggatgccctggggcccctccagctgtgtcatgagttgctggcaccaggtccctatttccaacactgagtggtggagatgtgtctgggtgctggaccctgccgcatgctcatccgggtttgttcatctggggagcctggctccactcccgactggagttcagctcctcagctgttgcctatcccaggatggcagaccctcactgccccatttaatccctgagaccttgtacttcccgtgatgccggcctcaccccctccccactcattgtccagacttgacctcaaccattgcccatcctaaagtgtcagccctactctgattaaagccagcccccacctcatatgcttccccaatctcagccctgattatggcccagcacttcagcccttatctcttcagggactcagaacctgatcacggcccagccccgaagccgtcacccatcccagagacccatcactgcctgtgaaccacagttagccacctgggctttactgatctgaggttccagcttcagttctgtctaagctgagctctccagccccacccctgcagggcaccagatgacagatcctagcgccccctgcatggagggtgggcccacggcagccacttgcccgccatctggtgctgctgcctgccaaggttggtggcttgcaaaccctgccacatcccctaggaggccccaggcctctgcacagcctcaggcaactccatgaccgcccctttgggagcaccacatttgggctcctgggtgtctgcacggttttgggctgcctgtggggtgtgcagcccttcgaggtggtgctggagagagacctgggactgtccggcctctgccatgtgctgctgctatgtgtgcatggccactactttggtgtggacctcggtaaccagggacagtcaagagaacccttgtcctgtcatttacctcattttagcaactttgcatctctgttccggtggacaggatctctgtgtatggctctctgatgccttccttcccttccccttgccaacaccctaatttccactcttctcctcccttctcccatctgcacttctgtatcgctctccttccctttccctttccttatttctttctttctttctttttttcttgatggagtgttactctgttgcccagaccggagtgcaatggcactgcaacctccgcctactgggatcaagcaattctcctgcttcagcctcctgagtagctgggattacaggtgtgcaccacgacacccagctaagttttatatttttagtagagatggggtttcaccacattggccaggttggtctcaaactcctggccacagctcatccactggcctcccaaagtgctgggattacaggcatgagctgccgtgcctggccctcatggtccacattggaccttaacccatcctaaagtgccagccctgctctgattaaagccagtcccctgctggccgcacctcctgctccatgcagcccagtctcactgtgtctcccccactcccctcctccctcacttcaccacgccagcacgccccaccactctctcctgccccaagtcttcatctccccgttctttctcctcctcttagatctggaagtgacccctctccccaacagctgccattggctcctccccaaaccccttccctgcctgcccctccctcaccaccaacccttcctctcagaatagcccctcgtcctcttagtctctccagactcctccctggctctagatccctcccttgtccctaatgctaatccctgtttctccccacaccgccctgcccaccctactactctctctcctcctcccttggtctccacgcccctcccctgacttcctgccgtggtgctggtcgtactccacaatgcccatcctgagtgttgcctacaaccccctcgcctcggctctcccctcccccacagtcccgtgtttcttcatacctcacccccatgttccttctcacatgcatctgatccccctccactcttcccgcaccagtcctggcacaccgcctccgacctctgattccccgtggcctccatggcaactgcaaaggtaagacagcaggtggatgacttggcagctgccgaggcccgagccctgcgccccgccgcatacttgcccaaggtcagtctgtccggcagccaccgaggaccctggcacagacacgatgtggtccagtgcctgtagcctcttgcctagccagggacccactggcaccctgtcacacacacctgtcaccagacagtccttcttccaggcctgcgtggccgaagtggaccacatccctggaaccacaaagtgccccatgcctgcctgtgagctgatggctggtaccagtgtgctgtcctggagggcctgggcctctgctgtgagtctccacccaagagcggacagagccagcatgaggcagggcctgcaagagacctgggtctggtctgtagtgactccacaggtacggattgaggacctactaagtgctgggcataggctggagatagagcaccaacaggatagagtcctgcacatacctttttttttttttttttttttgagacattcttgctctgtcacccaggctggagtgcagtgacgcaatctcggctcgctgcaacctccacctcctgggttcaagcgattctccagcctcagcctcccgagtagctgggactacaggcactcaccaccacgtccggttaatttttgtatttttagtagagatggggtttcaccatggtg[137 bp omitted]tttcttagctaacacttacagggcacacaacctacatcaggggctacctgaagacagcagttcttaaagccccccagcagcattagcaacacccagagcttattgaaaatgcaaaatctggccaggtgcagtggctcacacctgtaatcccaacactttgggaattgcttgaacccaggagttcaagaccagcctgggcaacatggcaagaccctgtctctgcaaaaaaagttaaacaattagccaggtgtggtggcatgtgcctgtggtcccaaccacagctctggaggctgagtagggaggatcactggagcccaggatttggaggctgcagtgagttattatggcagtactgcactccagcctgggtgacaaagtgagaccctgtctcaaaaaaaaaaagggccaggcacagtggctcacactgtgatcccagcactttgggaggcaaaggcgggtggatcacagggggccaggagtttgagaccagcctggacaaaaccccgtccctactagacggggcaaaaacccgtccctactagaaagacaaaaattagccggaggccgggcatggtggctcacacttgtaatcccagcactttgggaggcagaggcgggtggatcatgaggtcaggagatcgagaccacggtgaaaccccgtctctactaaaaatacaaaaaattagccgggagtggtggcgggtgcctgtagttccagctacttgggaggctgaggcagaagaatggcatgaacccagaggcggagcttgcagtgagctgagattgcaccactgcactccagtctgggtgacagagcgagactccatctcaaaaaaaaaaaaaaaaaaaaaaaaaaagaacggctgacctttactgagtactctctcagttctaagccctgttctccctcaatcaatcctcccatttacattttatggatgaaggaaaccaaggcatggatggttaaggaatgtgcccgatgtcacatgcctaaaacatggcatagctggcatctgaatatttgttcgtggatttaacagattctccccaacttggagtctctatatccacgtctcctccatgtgcctcaaggattcctggccccaccctgacttaccctttttgggtcaccatcctccactccccccatctctttttgcctctaggttgaagtgctcgttgagggaatctgtctggccttttgctatagattggcctctcgcccccgcgaaacacacacactttttgtccagctctgacctaaccatctatggcaagaggtagggtcatgtgaacacaatgtggtcactctatcaggaaggattcttttcttttcttttcttttcttttcttttcttttctcttctcttctcttctcttctcttctcttctcttcttttcttttcttttcttttcttttcttttcttttttgagacagagtcttcctctgttgcccaggctggaattcaatggtgtgatatcagcttactgcagcctcaacctcctgggctcaagcgatcctcccatccttgcctcccaagtagctggaactacaggcacacgccaccatgtccagataatttttgtactttttgtagtgatgggcttttgccatgtggcccaggctggtcttgaattcctgggctcaagcgatccacctacctcagcctcccaaattgctgggattacaggtatgatccactatgcacagaccctggagaaaatttaacaccctttgccatcggttcctgcaaaggtcccagggttgcctctgataggctttgcctggccaatgattggggcccagaggcgtgagaaataagctgattaggcagccctgggtcctgtacacatcactggatcctggatatggaatcccttcagtgcacatgctgaaagtacgggcagctgccaaaaagaaggtgcaagtattattattagaagggtgagggacaggcgtggtggctcactcctgtaatcccaacactttgggaggctgaggcgggtggatcacccaaggccaggagttcgagaccagcctggcaaacatggtgaaaccccatctctagtaaaaatgtgaaaaacaacaacaacaacaacaaaacagctggcgtggttgtgtgcacctgtaatcccagttacttgggaggctgaggcagaagaatcgcatgaacccaggaggaggagtttgcagtgagctgagatcgagccactgcactccagcctgggtgacagagcaagactccgtctcaaaaaaaaaaaaaaaaaaaagggtggggaaggcaaaaaaggcattcattactagagatccctgacaggttccccacacacccatgatgctgggtgggaccacatgtctccctgtcagcagaggctgggaatagtaggcaagacccctccaaaaaaagagcaaggaagccatgtttgtcatgtccagggcacttgaaagtagctagcacactgcatggtatgcagacactgcccagtcaatgccggttgttattattgctgctataattaatccaagggggagggttgctgggaggatgctgtctggggatgctggttgaatagagggtgggtccctggcttgcctgagcctctcaagccacctctccaaagccaggctgtgttcctggcacagccaccacagcctgtgtgtgaacccaggtgtgcaagaggtggtagggctccccactccccatgctgagggccacaagtgtaaggatggagtcttcccggctgggggtgactgcatccctgttcctccttctgcaatggccagtacttccctgcaagcattctctccggtctttgttaacagtcttgcttgggtcatccactgattccccgtacttatccttacatgggtcttatctcagaacccatagctgcaccctccctccatgaccacctcaccatccccacaccacccccaacccccattcctccccagcctggccagaccatcctcatcaaggtcccttcctcctcctgtacctgctggctaggagaggctatgacccatgttccccttcagctgccctagagggcaggtatgtggcatcacagatggagtcttaggctgtcaattctgaggtgtccatggctgtggctttggtgcagttgtgtggttacagaagtggagtcaaagattggggcatgaggccaggcatggtggcttatgcctgtaataccagcactttgggaggccaaggcaagtggatcacttgaggtcaggagttcaagaccagcctggtcaacatggtgaaaccctgtctctactaaaaatacaaaaattggtcagatgtggtcatgggtgcctgcaatcccaactattcgggaagctgagactggagaatcacttgaactcaggaggcagaggttacagtgagccgagatcgtgccattgcactctagtctgggtgaaagagcgagtctctctctctctcacacacacacacacacacacacacactcatgcgcatacacacacacacacacacacacacatatcggggcgtgacttctggatcatgagaaagaagggactggggaccttgtcttcatgggtccctgatccctcttcctctgacagccccccacctcgacccctgccctgagtcttgtgaccccaccacttgttttcccaccattgtgtcccagccacagtccccagtgcccagaatactcctgctttgtcgcacatggctctgcatgcccagccacatgtgccaacctcatcagccccagtgcactgcagccaccctgtaccgctactttcaaagcctgactagctgcctgctgcaggagggctgctgcccagcccttggggtcctggtaaccagggtgccccagtgctggcctgacaagtgccaagatcactgcaaggcctccacaggtagctggcacagctgcctgtcaacccagtccctgtccagccccattgtcctggaggaatcacaggtctgcactgccatgggagctgtctgtttccacacatttggaggagctcactatgaattcctcatctcttgtgtccactgcctggtgcgtctctgtggcgcagcccatgccaaccttgagccttcagcctggatctgctcccacttctgtggccacacagcttccccaaggccctgaccctctcaccctgtggcccgaggacatgagcccaaaagacctcaaccacagtgaggtgaggctccaaaggccccacactgacccactcttcctcactgtcccatctactccccggtcacccatgatgactactcttttcctactgatgctccctctagtagttctgcccctggcccttaaagatgtctactccaatttcctagtggccctagtggcaccagtggctactcaccaccttccccttgacttgcttgttgacccctccccacgactctccacttgtcattattattattattgagacagagtctcatgctgctgcccaggctggagtgcgatagtgtgatctcagctcactgcaacctccacctcccaggttcaagtgattctcctgcctcagcctcccaagtagctgggactacaggcacgtgccaccacgcctggctaatttttgtatttttggtagagacggggtttcaccatatagcccaggttggtctctaactcctgatgtcaagttatccacctgcctcagcctcccaaagtgctggaattacagggggccaccatgcctggcatccacttgtcattattaaccgccattgagattccacttaccctcccattgactctccattgaatcctcaatagtcatcctattaactccctaattgaatcccctcaacccacaggctcagcctcatctctgcattgaccctccctgtcattggacatcccattaattatttcattgagtcatccattgccctcccccagctgatcctactacgtttgtttgtttgtttgtttgttgagacagagtctctctgttgtccaggctggagtccagtggcgtgatcccggctcactgcagcctcaaccttctgagctcaagcaatcctctcacctcagcctcctgagtagttgggactataagcacacgccaccacaactggctactttttaaaattttttgtagacagggggtctcgctatgttgcccgggctggtcttgaactcctgggctcaaatgatcttcctgccttggcctcccaaagtgctgggattagaggcatgagccaccatacctgaccaatcctactgctgttatactgacttgcccattaatcccatttactgtcctattgaccccacccgacaccgtcccgacctcccacactgatgctttctgagcagtttgttgaccttcccagtgatccattgactggcctattaatgtcctcatttaccccctgtggacctgcccatcaagcccccacccctgccatctactgattctctactgagcttcctatactggatatgactaactcctgcactgcattcccctgcttttctattatccctctaattgagcctctctttgactcatcttctcaccctgttgagttttctatagtgtcccattcattcattggcacaccttctcctagagcactgtccaagtctcactaggccctcattgatcatagaggcatccttcccagtaggatgttgcccattaaccttgaactgccatccacaaacccagcagcgtttgtcagtcactgactacccttctgactccacccccatttactctccaggggagcccccattgtcgcccaaagccactaagcctcggtcctcagtgatccacggagttgtccatcccttcctccattgcccttttctagatcctccccttgccccccgctgctggcccctcttcactgactcttatccattctcttattgcccctcattgaacttccactgacctctcatcaactctggccatccaaccactctgccatggatccccctttgaatcctatactgaccccccattgagccccaagcttacctcccaccaaatcctcctatgatccctaatgactccccccattaaccagccactaaggttctctttgacccctctctgatcctttctgctgactcccccactactcagtgaccatctcctgctgctgttcaacctgcctgcatgccctctgtgtaggtagacggaatttgggaatcgctgcccttctcttatggccaccacctccacacccaactttggggctgccagctgtacatggacacagactttggcctcttgctatgactgggacagcctggcacttgtgatgctgccatggccatatggaccctacctgtgtagactctggccccagtgaccctattacatccttgcccaatgcccggaaggttgctaagttgccaggttgcagccaggtctgtgggcccctctgccctggattttgccagatggccgtgcatgccctattcaccaggaatgggcagtgagtgtggctggcagtggcggtggatcccttggagcccggctatgcagcactgtgaccaggcccattcctcagcaagtgcctggcccactgtgtgccaccaatacagcgcccactgaaccatatactgggccctggctgcctacactgtggcttgcagggctctgggagtctgccttctgtcacgagtgtgctttcgagagaggggtaagctctgaagagccctgacatgggccaccaggggacggtcgcgtcaggaccaacagaagttcaggcctgggcagtggggctaggcgaggaagggtgggtactggagaacagttaggaccagattagatgcggcaagacaggcaggggtatgacttgatttgattggtctggtttgattaacaaggtctttttaaaatttttaacaatttttatagagacaggggtctcactatgttgcccaagcttgcctcgaatccttgggcgcaagcggctctccctcctcagcctcttaaagtgctgggattacaggcgtgagccacagcgcccggcctgattaacaaggtctttctgtcttttatgcctcttttttcggtgtctctatgtctcctccgtgccgctggctctctgcatgtctctctttctggacctccctctgccccgccccttcccctgttcccgttccccttctctcggttcctcgttgtttcttccccgggcacacccgtgctgctctctgcgggcatcctccatctccgcctcccccatccgaccctggctatgtctcccccacctctctctgtctctgtccctgaccctcccacccccgcggcccgccccagctttgcggtgcccgctgcgttcgcgctgagctgcgcgctacctggccacatgcgcgggtgacagccctgccgggagcgctgagtatgcggccagggcttcccgctgagcggcgcctctgagtgcccgcagccgaatgcggctgcttccttgcaggcggacacccaccgctgggcaccgtctggtaccctgcccctgcggcccccgcccccgcgctccgcccctgtgctctcccttgctggcccgcaccattcccgggctcaaaaaaataaattaaaaattaggcgggggggggggggggtggtgcgcgcctgtgttcccagctgctcaagagactgaggtaggaagatccttaagcccaggaggtcgaggctgcagtgagccatggtggcgccactgcactccagcctaggcaacagagccagacctcgtctctaaaagaattaaataaaattaaaaagtgtatgtctttaaaagataagggtgtttaggccaggcacggtggctcactccagtgatcccaaccctttgggaggccgaggcgggcaaatcacttgaggtcaggagttcgaggacagcctgggccaacatggtgaaaccctgtctctattaaaaacacaaaaattagccggaagtggtggtgcatgcctgtagtaccagctattcaggaggctgaggcaggagaattgcttgagcccaggaggtggaggttgcagtgagccgagatcgtgccactgcactccagcctgggcaacagagcaagagtctgtctaaaaaaaataagaaaaaagaaaaaagacaaaaaaaaagataagggtgtttagcagagtcagctagatggtggggatggagtataggaaggacaggcatgactgagtagagacaagataaagggttatggcctggtgcggtggcccacgcctgtaatcccagcactttgggaggccaaggcaggtggatcacgaggtcaggcattcaagaccagactggccaagatggtgaaaccccgtctctactaaaaatacaaaaattagctggccatggtggtgcgtgcctgtaaccccagctacttgggaggctgaggcagagaactgcttgaacctaggaggcggaggttgcagtgagccaagattgcgccactgcactccagcctaggtgacagagtgagactctgtctcaaaaaaaaaaaaaaaaaaaaggtaacaggttattagcagggtcgggaaatgaatgatggtaatctagactcttgatggttacaaagcagagataagtgatcatttaagcaatagagagaaggtggaattgatactttggtaagtcattcctttcctcacctagaatgttgaacacatattaccaatgtgctagtgactggctatgatgttttttgtttggttggtttttgttttgttttgtttttggagacagaatgttactctgtcacccaggctggagcatagtcatgtgatcacagctcactgcagccccaaattcctgggctcaagtgatccccccgcttcagcttctggagtagctgtgactacaggcatgccccaccatgccatcctaatttttgtagagatggggtctcagtatgttgctcaggctggtctcaaacttctgggctcaagggatcctcctgccttagcctcccaaagtgctgggattacagatgtgagccaacatgcccggccaatttagtgttttatttagtgcttttcatgtgctcagcactgttctgaggaattttcatgaaccatctcatctaatccttattgcaactgtatcagtcagctaatgctgcataacaaacaacctcaaaatcttagtgacttaaccccaggcagcttcctaactcatgtgtctgtgggttggttggcattggccgatcttagcaggggtcatgaagcacttaccatatgcctagcataggtactcttttttttttttttgagatggagtctcagtctgtcgcccaggcagtgcaatggcaccatcttggctcactgcaacctctgcctcccaggttcaagcgattcttctgcctcagcctcctgagcagctgggactacaggcctgcaccaccacacctggctaatttttgagtttttagtagagatggggtttcttcatgttggccaagatggtctcgaactcctggcctcaagtgacccgcccacctcaacctcccaaagtgctgggattacaggcatgagccaccgcacccagcctgaagtaggtactcttgtccttccatgttacaaacacagaaactgaagttcagaaaggctaagtcccttgtccaagtctcaccctcatttgtggcgcaatgaggagggacatccaggtttcagggaggcatgggagcaggttcagcctcctcagccccagtcctgaccccttacctcccctgcaggtggatggtgagcactactggctgccctgggcactgccagggggctggggttggccgccttggagggccaccatgccatggtgcacatggcctgtgggctgtatctcatgtacacctggggaagctcatggtgccttctgaattctaaggcgagctggcggggctccatgggtcctttggaggcaatgttggcctacttgacctgcctctggataccgtgtcctggtccaagggcctgatcactatccactgcccactgacccagcccaaccatggctttcatgtcagctgcccacatgacttgcccagatcttcaaagctcccaaactgtgtggcctcctgcatgtgccggatggcccctttaaccactgtgtggcccacatcaacaagcccttccttagtatatgcctgcaggatgcgtgtcatcccagtggccagcaccgtggtctctgtgacactctcacaggccatactgcagcagccaggagcctgggaaccctgtgatgccctggaggggccccaagcattgccataagtgctctggcttggtctggggtgcaggcagggcagactatgggttggctggaagagccccttcccctggtgggagtccaggaagaattcctagcataggtggaattggtggaggagaatgtgtgggaagaggatccaagggaaagggaactgcagctacaaaggtgtggaggtggggaaataccaatgggaagccaggctgactaggggca[131 bp omitted]gtaaaacagtgtctctactaaaaatacaaaaattagccgggtgtggtggcacacacctgtagtcccagctacttgagaggctgagggtggagaattgcttgaacctggaggtggaggttgcagtgaatggagatcacaccactgcactcgagcctgggagacagagggagactccatctcaaaaaaaaaaagaagaagaagaaaggaagaaggaagaagaaggaagaagggaaaagaaggaagaagaaggaagaaggaaaaagaaggaagaagaagaagacggaggaggagaaggactaggagaaggaggaggaaggaggaaggaggaagaaggaggaagaaggaggaagaaggaggaagaaggaggaagaaggaggaagaagaaggaagaagaagaaaagaaatttgagccctaggcatttatctttgccaactgcctgcagcacagacctgcccaccccaaggccattacagcatctgtgcacagacctatgatttggggtgtgtcctgcctgccaaccccgctcactgttcctcccgatgctatgagagctatgaacgtggcctcaccattgatggcacagactgtgtgtcccaggaccactgtggctgcttccacaatgaatgctaccttctggtgagagggatctccaggcctggaaggtgaggacaagtctcccaaacctcatcataagatgttccctgaatcaccagtatatcagtcagcattttcagttgtaaatgacagaaaatgatgccagctgtcttaaatacagacgagaatttgtctgcttttacttatctgtaaagatgaggccttcaggtctggctggttcaaggactcaaatgatgttgctaagaacttagtttctttccatctttcatcctcgccttttcctttttctgcgttagcttctatagtaattaggctccaggtccatatggtagaacaaaagctcaaaattacagtggcttaagctttttgtttgtttttagagagagggtctcactctgtcacccaggctggaatgcagtggcgtgatcatagctcactacagccttgacctcctggactcaagcaatcccgacacctcagcctcccaagtagctaggactacagttatgtgccaccatgcctggccaattttttttttttttttttttttttttttttttgtagagacaaggtcttgttgtgttgtcccggctggtcctgaactcctgggtgcaagcaatcctcccaacctcagcctcccaatgtgctaggattacaggcgtgagcaatacgctcagcctacagtggcttaaacttgatagaagcttaattatctctcacaggcagtccaagtataaccagtttgcttcctccaacacaggctccatctgtcacgtggctctgcctcccctgtggtattgccctcatctcttcctcaccgcagctacattcctgcaagttggaaggagaaaagagggcacaaagaggccaggcctcctccctttaaggacaaaacccagaaattgcacacatcacatccattcacttcccagtggccaaactttatggaagggccccatctggctgcaaagggggctggaagatgtatctttagctaagtggccatgtgtgcagctaaagattctaatttggccaagtgcggtggctcatgcctgtaattccagcactctgggaagccgaggtgggaggatcacttgagcctaggaatttgagaacaacctgggcaacatggtgaaaccttgtttttataagaaatacaaaaattagccaggcatggtggtgagcgcctatagttctaggccactgaggtgggaagatcacttgatcctgggaatttgaggcttcagtgagtcacaagcatgcccctgcactccagcctgggcaacagagcaagaccctatctcaaaaaaaaaaaaaaaaaaggaaaagacaaagaaaaaaggccaggcatggtggctcacacctgtaatcccagtactttgggaggccgaagcaggcggatcacttgaggtcaggagttctagactagcctggccaatatggcgaaaactcgtctctactaaaaatacaaaaattagccggatgtggtggcgcatccctgtagtcccagctactcagaaggccgaggcaggagaatcgcttgaacccgggaggcagaggttgcagtgaatggagatcacgccactgcactccagcctgggtgacagagcgagattccatatcaaaaaaaaaaatgctaattctaggaaagaaatggagaatgggtatctgagactgccacagcctcattttcaaactacccctctgcctgcgggaagtgatctcccactgctccaggttgatgatgtacagtctagcagtcccagtggggagacagcacttctttcttcacagtttcaacagaagtcccgggtctgattctcattgtcccagtggaggtcatttgcccatccctaaacaattacaggggtcaggggatgggatattctgatttgtctctaagtagccaggcctgggcatgtaacagagctgtagccagagccagagggcagggatattacccaggaaatcccctagaataagagtgggccagttccccaaagacaaactgagagactgtaaccagaaaaccattgacaggccctgggcaggaggcaatagtattccctttgaggttttgcagctccttgagtccactggaaagtaaagaaagtccccctaggctgattgacatagttgtcttggagattaagggtcatttgacaggaaaaagatagatgtttaaattccagagtacaagccagcatggtggctcatccctattatcccagctacttgggaggatgaggccggagttcaagaccaatctgggccacatagcaagaccctgtctctaaaaacaaaacaaaaaataaatatttaaaattccagagtgaagcctgggcaacacagcgagactctgtctctacaaaaaacaataaaagaagaattagccgggtgtggtgggatgttcacgtaatcctaaccactggacatgttgaggcgagaggattgcttgatcccaggagatcaaggctgtagtttcaccaatatggtgaaaccccgcctctactaaaaatacaaaaattagcccagtgtgctggcacatacctgtaattccagctactggggaggctgaggtagggagaatcacttgaacctagaggcagaagtttcaccatgtggatcaggctggtgtcgatctcccgacctcaggtggtccgcccgcctcggcctccaaaagtgctggaattacaggtgtgagccaccgttctaggacatgtatttttgatagatacatacacctgccaggcaggattcacagtggtttgtgattctcccctgactccaagactccaagcctaatccccgcccctgaccagcttctcctctctgaaggggaatggaccccccagctggttgccggcccaagtgtgcagagccgcggttgcgcgctgggtggaggggtcccccaagctccggtgctggtggggcccgaggatgctgtgtccttgcgggcctccctagcgctacgaggacacctccaggcggcccgcggggacaacaacggcattgcggcctaccacctaaagctcctgggaggacaacggggttgcagtctagtcgactgttcagggtgtcccggactccgggctttaacagtcggtaaggacccaaacaccgctgtccactgccccgactcccacccgcagagggcgcgaccaacccagctcctagagccacacgctgcctctgggggcttggcgcccacactctctctgcttgtcttcccctggcccgagaagcctgtccaaccggccgagagccatttccctacggggtctcgtccctctgcacgtgcccagggctgggaccccagacacagacctgccccggacgagggaacgcacggagcttcccaagatggtttgaatcagtaactgacggcaaaagcacgcttgtgcccggcgtctctcccagtgccccgtgcccttgggacccaaagtccgaaccggtagccgggcgcggtggctcacgcctggaatcccaacactttgggaggctgagaatcgtttgagcccaggagttcgagccattctgggcaacatagggagacccatctctgcaaataataataataataaataaataaataaataaataaataaataaataaatagcgggcgcggttgcgcgcgtctgtggttccagctactaggggagttgaggtgggaggatcgcttgggcccaggagttcgaggctgcagtgagccaagatcgcgccactgcactccagcctgggcgacagcgagaccccgtcacacacaaaaaaacccctagcttcctcttctcccagaatgcaggagttaggtgaggaccctctgttccctccaacccaagacctaggagtccgaacacataacgccctccaggcggtgccaggatccccagaactgctgtcccctcaagaacacacgtcccctacgtgggaggccgcgaccagcgactccgcccacttctcccagccggctgttacgtaactgcaacgacagccagtcagacgcggcagcgccggatggcgggaggcgggagttggaggccaagggaagcgctgggcggaagtggctgtggctttgccctttggcctttgctggctgtgtggcggctccgcggttcgcaggtcgttcgctgagcgtctctgcttagccgcggtcatgagccggcacagccggctgcagaggcaggttctgagcctgtaccgcgatctgctgcgcgccgggcgtgggaagccgggcgccgaggcgcgagtgcgggcagagttccggcagcatgcgggcctgccgcggtccgacgtgctgcgcatcgagtacctgtaccgccgcgggcggcgccagctgcagctgctacgctcgggccacgccaccgccatgggcgccttcgtacgcccgcgggccccgaccggggagcctggcggcgtgggttgccagcctgacgacggcgacagtccaaggaacccccacgacagcacgggggcaccggagacccgccccgacggacggtgacaggcgaagagccgaactcgctcgatggcgtggtggagccaggaggctcgcctgactgcatggggggactggggaacccgcctaaggtgagaggtcttaagagactagcttgacgaattggggatgtcagagactcctccttggcgacgcagggggcctagagagccccgtgatggacggcaagggaggcccgccttttccgatgcttggagacaggtcggtgctcctcccccatgagggcttggggcggcctgggacgctggcgggctggacagtgtcaagccaagagctacttgcccgaaggtacggggagccaggacgacccccggtggacagggagagcctgagacgcccttctcttgacccctgagaacatacccacttctggctcctcaaggagtctcccctctcctgtatttaactctgagaagtgcagactttttgctgagaacgttttgggaaggtgccctgatgagcggtgagaagcccggaatccccttctggaaaactttcccccattaattgtgacaagccaggaccatgaggaaggggtaggggtctatcaccctggttgatcaactgaagacccccaaaggcccctacttgatggttttgaggggcaacattgactcatttgccccttccctctcggaatgttggacaaagggaataaaattggggatatgtctacttccctgttggtggtcttaaagcttttatatatttcaggatttttgaaacacccccagcccccctgccaccacacacacacgcacacagacacctggaagggaccatctgggaggtgataggtgtggggatctgactccttccggagccctgtagactggcacattgattgaagcggcatagttttctcccctgggcagatctgtggagggggctcatcctggcttaacccccaaagataccccagttggctccctaatggagggcaagtgatttaacatctttgtgtggaagaggaaatggtggagctgagaactggctcggagcccctgaggcagtagtgagggtctcagacctggaaatttctcaaacctggctgaagggtccagcctcagctacagtgaacgacaaggccctggggcaggagaggggagatgaaccccatagatcacagatatactccctccggtgtccccatatgggcctgccctagacattctgtggagggatgcattttgcatcgctgagctatatttgcacccatatcagttaaataagtggaaatgagttcttgtggatgtagctgtgggtaggaggaccacaggtaaggagcatagacctcagaccaaagggaggatggacggaagagaaacagtcactgccctaatcccggtgggggagccacattcccaaatggttataaagtggaattgcagtttgaagaattaattgccgggataggcttctaggcaagaagaccaaggctgggcgcagtggctcactcctgtaatcccagcacttttggaggccaagatgggcggatcacgaggtcaggagttccagaccagcctggccaatatggtgaaaccccgtctctactaaaaatacaaaaattagccaggcgtggtggtgggcacctgtaatcccagctactcaggaggctaaggcaggagaatcgcttgaaccctggaggcagaggttgcaatgagccaagatcacgccactgcactccagcctgggcgacagagcgaaactacgtctcaaaaaaaaaaaaagaccagtgtggggaaaggcctggagggggcaaagggaagaaatgcagggtctcaggatctcagctggggcccggagtgccccaggcacaaggctgtgggtttacttgattgtggcttctacttctgctttgtctcaggtttgtcctcaccatgggacttcagccacctcattcatctctctcagcctcaatttcttccatcagggtgatcatgttagtcatctcctggctccatctcaaaagccaaagaccagtggggtcctactcatccagccccccaattacatcttcagctgcatctcctgccaccccctcactcctggctccatgatcttgagccctgacaagccccaggattggagctcctggcagggctgcaggcagggatcgagttttcaatggggtctggcatcctgggtcaggagagaagtcacattaacctgggtgttaacagatgaatgagattttcccggtagagaggatggaggaatgcctgatttgagggaggagctgtgcagatgaatagtggctaagagcacggacccgggaatgggaaggcagggtttgaatcccagctcccatacttactgattatgtgatcacaggcgagtgatttaactttttttttttttttttgagacagggtctctgtcacccaggctggagtacagtggcacagctcactgcagcctcgacttcccgggctcaagtgatccttccacttcagccttctgagtagctgggactacaggcgtgcaccaccacacccagataatatttttattgtttattttattttatttatttatttttgagacagagttttgctcttgttgcccaggctggagtgcaatggtgcgctcagctcaccacaacctccgcttcccaggttcaagccattctcctgcctcagcctcctgattacctgggattacaggcatatgccaccatgcctggctaatttttgtatttttagttaagatggggtttcaccatgttgaccaggctggtcttgaactcctgacctcaggtgatctgtccacctcggcttcccagagtgctgggattacaggtgtgagccagcgtgcctggcctattctttatttttcggagacagggtctcactgtgttgcccaggctggtctcaaactcttgagctgaagcggtcctcccacctcagcctcccaaagtgctgagatcacagtcatgagccaccatgcccagcctgatttaacctttttgcctgaatgcccttatcagtgaaatgggcttaataagagcctccctgatgtggccattatgatggtacagtgaattaaatgcctgttgtgaggccaggcgcagtggctcacgcctataatcccagcactttgggaggctgaggtgggcagatcacctgaggtcaggagttcaagaccagcctgaccagcatggagaaaccctgtctctactaaaaaatataaaattagccaggcatagtggtacatgcctgtaagcccagctactcaggaggctgaggcaggagaattgcttgaacccgggaggcagaggttgcggtgagccaagatcgtgccattgtactccagtctgggcaacgagagtgagactccatctcaaaaaaaaaaacaaaccctgttgtgacagcagatgatgaggcctgacccccacccatggccctcctgccctcttgggttcacttgcaactgtagaagcaggttctcaggaggctgcagcctcctcccctgagcccctgcatctctgttgctctgcctgagggcttcctgggagtcctggaaggtgggttaatgtgctcagaggcaaccctcagcctgtagggggcagcagtcactggatgagcgccctggcccacctctcatctggtgggacaacatgtgttctgcagggttcctcaggggcacccatggaatggagccccagttgcccacagtggtgtccactccatgagcaccttttttggcttttcccctgccctgtctcttccccactcccgcttcctgggatcacatcccagataaatcatcacccgagtccttggctccaaggatgcttatgtgtcaagcatggaacagtgcccagttctctgctgatcctctgtgtgcatctgctgctctgttttttgtttgtttttgagacagagtctcactctgttgcccaggctggagtgcagtggcgcaatcttggctcactgcaacctccgcttcccaggttcaagcactcctcctgcctcagccgccccccgcccccaaccccgctcgccacgagtagctgggattataggtacctgccaccatacccggctattttgttttgttttgttttgtatttttagtagacacggggtttcaccatgttggccaggctggtctcaaactcttgaagtgatctgcccaccccggcctcccagagtgctgggattatatgtgtgaagcaccgcgcctgggctgctgttctgtattttactctgctaaggcacagggtcaatgtttctcaatcccttgacccatctgttaaacaagaaatcccctgatctaagaaaatggctataaaagacatacagggattagagtaatttagactacagagtgagttaaaaatagaactgggttgttaaattttctgattttgataactactagaattgtgtgagaaaatggccttgttcttaagacatacacactgaagaatgtaggagtaaaaaggcctcgtgtctgcaacttactctcaaatggttccaaaacatatgcactgatataaatatattagcaagggtatggatggtaaatcacaaggagcaaagtgttaaccactttgaatctgggtaagggcatatgggagtttgttctagttttaaaaggtttcccaacacttggggaggttgaggtgggccgatcacttaagcccaggagtttgagaccagcctgggcaacacagggcttgagctgccatgctcggcctaaattttaaaattgaagtattttaaatgtaaatgtaatgtgaaagtattttgaatgtaaaatattttttgttacacaacttcattgttttagtaggactgtattgcattttacctgttaaaaatttggcatctgaattaagatgtgctgtaagtgtgaaatacacactagatttcaaagacttagtaagaaaaacagattgtaaaagatctcattatttttatattgactacatattgaagtgataatattttagacatgtcaggttaaatagaatataagttaaattattaaaattaatccatttttactgttttaatgtgactgctagaaaatttgtaactacatctgtggctcacattctattcttttttttcttttttctttttttgagacagtctcattctgtcacccaggctggagtgcagtggcgtgatcttggctcactgcaacctctgcctcctgggttgaagtgatcttcctgccttagcctcccgagtagctaagattaacaggcacctgccaccatgcccagctaatttttgtatctttagtagagacggagtttcatcatg[131 bp omitted]gagttcccatggcctgtttcctcactacaatctgctctcatggcaaaattttaacatagtggctccattctactgactccctgatgccttcttcaaccacattgtttgagttgtgcccccttcctcttgctcactttttctcctcagcacttaccaccctgtgacccactacaatttcacttatttcttttagttattgtcaatttccccaagtagaatatcagctccagaggcatcgtcttgttcactgtcgtgtctctgctccttgaccaggacctgacacatagcagacagtcaatatttgttaaatgaacgaatgacacagatatgctccattaccgagcctgttgggtcaatattgccaagactgcaccccctatttgctggtgatctcagggggaccatgcctctttggttgatgccagagtctcagcctggcctttgaaacaggacaaatccggtttgcatcctgacttttccctgaacctggagtctctcccagaatctgcagcttcccccaccccatcagtgtctgttcccctcttctagtagcaacaacttgatactctttggagacccacgcttctgccattttcagtccacatggtttaggtggggctgaccgcagcccccagcaaaggtggagcatgtgacggaagccagaggagccaaccttgggactttggttggaactacaaaggaacagtgactctactattggctgctaaattggtggggtgtgtgtcacagtggagggaggcttagcatgactgactccattttgcccctgacaccctgcagtaacatcctttaggttaaaagcttctgcttagttttgtgtgtagatcagctaattacaggaggaatttagtttatagctcaattttagaaaaaatagcagtccctttcccaaaactaaccaccccaccaagagatcaggaaactgtacacacaagtaacaatgttatactagagatttacaagaatattgtgacctgacctacatcatcaaagaagttttcttctggactcttgctggcgaccagatgtctgcagtcattggtcacctaacctcaacccccttcccttagcataaaaagaaacctaaaatttatactaagttgagatggttctttttttttttttttgagacagagtctcactctgtcacccaggctggagtgcagtggcgcaatcttggctcactgcaagctccgcctcccgggctcacgccattctcctgcctcagcctcccaagtagctgggactacaggtgcccgccaccacgcccggctaattttttgtatttttcatagagacgaggtttcaccgtgttagccaggatggtctcaatctcctgaccgcatgatccgcccacctcagcctcctaaagtgctgggattacaggcgtgagtcaccgcgcccggccgagatggttctttaggacactagtctgccatcttcttggtttgctgtctctccaaatgaagttgcttgctttttttttttgctttttttttttttttttttttgagacggagtcttgctctcccccaggctggagtgcagtgacacgatctcggctcactgtaccctccacctcccaggttcaaaagatttgtaaaaatacaaacgttagccaggtgtggtggcgcatgcctgtggtactagctacttgggaggctgaggccagagaatcaattgaacccaggaggcagaggttgcagtgagccgagatcgtgccactgcactcaagcctgggcaacagcgagaccctgtctcaaaaaaaaaaaaaaaactagcctggcatagtggcacacgcctataatcccagctactctggagtgtaaggcaggagaatcgcttgaatcctggaggcagagtttgcagtgagctgagattgtgccattgcactccagcctagggaagagtgagactctatctcaaaaaaaaaaaaagccacaacttctttgtccctagggtacaaccagcaatgggatgacaccccaggtgcccagtgcagcaaccagtaactcacccagtattggctttctcccttcctgagctcacgtcctggctcccctgccacgcctaaataaagaactggtgcttgactctttgtgtcagggtctggggcagccccacccaagatgggctgatgcagttctgtattctgttctcaaggcaaaagggtccatccagacatatccaggccacatcctagattccgggtatgaaggcacctagtatcttcacacatcctttgacagtgaccatttattacacacatcagactgggggaagaccattgacatagctgagcaccaggtagggtgtcctgggtattcgggcatgagagcagcaggggcctcctgacgcgggcaggagaaacatggcacccaccaggaggaggaagaggaggaagaggataaggaggaaggtcagaggctgcctggatgcaggatcgggggccctgtgaagggaaatgcagtgttaaacatacaggtgggctgctgctaggagctctgtcccccacaccctagtcccatctctcaggcacctcaccctggattcccctccagcctcacatcctggagatgaggagatgcttgcctcttcttgtcctaaggagggagagcagccagcagcagaatggatagaaatgatgctttatttgtttatttattttgagacggagtctcactcttggcacccacgctggactgcaatggctcaatctcagctcactgcaacctcagcctcccgggttcaagcaattctcctgcctcagcctcccgagcagctgggactacaggtgccaccatgcccagctcatttttgtatttttagtagagatggagtttcaccatgttggccaggctggtcccaaactcctgacctcaagtgatccgcccacctcagcctcccaaactgctgggattacaggcatgagccaccacacctggccgacacattattttttgagacagggtctcagtcacccaggctggagtgcagtttcacaatcacgactcatggcagccccaacctcctgggctcaggtgatcctcttacctcagcctccctaatagctgggaccacaggcacatgccactgcaaccatttacttttgtttaatgatttgtagagatggggggagggggcaggtctcaccatgttgctcaggctggtcttgaactcctggccttaagcaatcctcctgccttgacctcccaaagtgttgggatcacaggcgtgaaccacggtgcccagccacaagtgacactttgtgtcacctttaccctactacgatagacctacaaagctggtcttatttcttctcctttcctggcacctccttatccccaggaccccacacagacttggaatatctccaagtgtagtggatgtctggttgtgtctgtcctttatccaatacaatccccctttttctgataacagtgccttaattggaggtgggcggctgtcatgccttccactcccagaccttcaggttcaagtgaagctgacagccacctccccaacttccatgattggtgtgacccagacctggccaatctgagcactctggtttattcaaggtgcagcccatgaccccatccggtaagtgggagtcagccctgggactttggcagctgtcagtagggtcggaggcatgctccttcccctggggtgggtaaaccagtgggagtggcagtgtagccactggagcacccattttgctaagaaggaagccaccttggggacttagagcccaagaaagggagggactgagccctgatgttatttctttctttcttttttttttttttttttttttttttgttgagatggggtctcactatgttgctcagactggagtgcagtggtgggatctcggctcaccgcaacctccgcctcccgggctcaagcgattctcctcctgagtagctgggattacaggcatgcgccaccacacctggctaatttttgtagttttagtagagacggggtttcac[140 bp omitted]ctggacctttccattactttttttttttttaatagcattccctttcttgtgccttttgatttcttgggtttctgtcacttgccatcaagattcctgagtgctacacctggttgagaactggctcacctgaggcttccggagcagggagtgtctttggtgacgtgctaagcgtttctggtggccgaggccagactccagcatgtcctgtcgggagtgagaggtgtctgcttcctggagaaccagcaacaaagaaaaacgtggttgggggagggccaggatagggatgtcatagagatgagattctgggggagcagagagatctcacaggacagacaaaggcagagccaaagaaaccaagagaggagagaattatttattcattcattcaataaatgtgtaatgagtttctgttacaagccaggaactgttctaggagctgaggacacagtggggatggaaataggcaaattcctggcctccgtggagcttatatttgacaggagagagaccataaattaataagtaaatgaggcctggtacagtggcttatgcctgtaatcccagcactttgggaggccaaggcaggcggatcacctgaggtcaggcgttcgagactagcctggccaacatgatgaaaccccatctctactaaaaatacaaaaattagccaggaatggtggtgcacacctgtaatcccagctactcgggaggccgaggtaggagaatctcttgaacctgggaggcagagtttgcagtgagccaggattgcaccactacactccagcctgggtgacagagtgagactccatctcaaaaaataaataaaaatttttaaaaataagtaaatgtacaaagtcaagctgtggtgagtgctgttaggaaataaagtaagaagataggagtgctcatgtttggaggtcacgacaggcctccctgaagaggtggcacttcaggagagactgggacagtcaggaggtgagtggggcatcatctgggggcctcaggataggagtgaatttgagatggggcttgaggatgtagacagagacagacgagagagagaaacagtgagatagaaggagacaccgagagacagagatagagggggagacagagccactgacacctccttggaagggcaggatcttgctagaaggtgcgcagagatgtccccagggtgcctggcagaaggtccctcaagggggtctgctctcacctcaaggccttgtcccctgccctggggccccctctggccacacagctcacagggcactcctagtgtccgggctgtcttttgtcccaagggcccaaggcccccaatgtcccccgccggatcccactccaactctgtggaagtggggaggctactgggtgcccagggcccccagaccccaccaggtcctggccagtccgagtctccctcgacctccaagtcctggtccagcgtgttggcctcctcgaacacctgggtcaaaggacagaggtcatggaggctatgaggttggggcctgggttgggtggggggtatcaagatgggccctaccaggctgtagctgaccagctgggcctgcagctgccagagccgccggaagatggagtctcggtaagctcccagggcccgcaggatctgctccagggctgcccaggccctgggctcactccgctgtgccagcccctcaccaaacgctagcagcgcctccacacgctcagctgcccctcgtaggtccacctggagggcctggggacatatggacatcaccccacgcacacaccagggacccaaaacctggagttacccccctcccccatttcctatccaaaggcctggaacatgcactcaacccatttcccatcccggaaagctggcacccactgctggggccgtgcccacccccacatcctggcctctcctgcctacctgcagctgcaccatcccactctgggccaatgcccagtgccccaggccttgctccaggtcctgcagccggcggcccagccccagcaggcacaggtgcaggctgttctgctcagcctctagtacctccaggccagaaatggggtgctggggaacacaggagccaggtcagggccagtgggccaatcaagatatcacccctgctcccatccccacccctcttctgtaagcttctggaaacttctctgtggcacagtccatctccgggtctgtctgcaccaggatggctcccactgggggggccttcccagtggagccaggcctgaggacagatatctagttcaaggtctccaggttttcaaagctcctggaaacttggatgtgtgaggcctggggggtctggacagggagcggggctgggtaccccccaagaagaatggggctacaccaggagcaatgatgaaatgcttctcagccgggcgcagtggttcacatctgtaatcccagcactttgggaggccgaggcccgaggatcacttgagcccaggagttcaagaccagcctgggcaacatggtgagacatcatctctacttttttttttttaataaaaaagaaatatggctggacacggtgacgcacgcctgtaatcccagcacttcgggaggctgaggtgggtggatcacctgaggtcgggagttcgagactagcctggccaacaagtcgaaaacccatctctactaaaaatacaaaaaattagccaggtatggtggcatgtgcctgtaatcccagctactcgggtggctgaggcaggagaatcactgggacctgggaggcggaggttgcagtgagcagagatctcaccactgcattccagcctaggtgacagagagactccatctcaaaaaaaaaaagaaagaaagaaatacgtctccccagttggtcagatattgaaacacttttccagaaggtccctccccctacagacacccaacacctttccagaatcatcacccggtcctcagtatggaggccagactccaggggacagagaggaggtggggctggcacaaggggtctgggtcacctcagctcacctcacagtgtttgcccccagctgggtcctcgtaggaagagggtgttgaccatctcggggggtgagcggcaggctcattgccccttggcccaccctggaagtgctcaggagggcccaaggagtcctgtcccagggtctgggcctgctctgggctaggaggcagggggcggtgactgggtgagtctcgacacctcacttttcagcctaccgtcaccccaaccctggtggcctctcctatgtccccaggcgatcacagccatggcacctcctaccctcacatggcccctgccaccacgcctacccttttgggaacaagcttccaaagccccggcccccacctcgtgctctcctctccggacgcggggcagacggtgcatccaacaatgtccgcctctctaggtgctcccggtgggtggttgaggggctctgagccaagtctagggcccagaggcagggacagggccatggctgggggcctggggacacaaagtcaggtgagggcagccagtaagacctcttccctagacaagggtgtcccagagctcctccgctggagtcacccgggcctgaggctgcaggagaggcccaggacaggtctggctccgccccttccaagaggaacctggacccggccatttgatgcccagctcaggtgacagaagagtcacttaactccttcctccctagcaggccagtagctaaatctcccagcatcactccacgccatccaagagggttccagatagaacccctgcgccacctcctcaagagccctggattctgccccactgggaacccagaaatcggacctccagggcctaccccattcatttaagaccctagatgccgctcccctcaggaaaccaagcatctggcccctaaaaaataaaaatataaaaccaaggaaagatttttttgtttatttggtatggggtcttctgtagctcacacaaaattattgggaaaataaataacccaggggagccccctttgcccacggttcctaggtcgcggagtcacagcagccccaaaggggcaggaacctgggaatccgaggggtcccggccctggcggtcacttgcccagcaggaggccggcgcgcagcacgcggggcacgcggcggatggtcagcgagacccgggtgccgcgcaccaggcaggctcccggccgcgccgacgggcaggctgccgcattgggcggcgaggaggcggcgtccagcgcgtctacgcgggcggcggcgatgccgtggagaagacgcgtgtaggcggggccgcggagcaccagcaggctgcgcggttccagcagtagcgaggtggtgggccggggcggaggccgaggctgcagggcgggttgagggtcagcagggctcaagaagtcggggggtgggggtgggcgagaggtcggtagcctccggggatcagctagtccccaggggcaaaagctgaagagcaagtgtgctcacaatgatggaggctttggtggttcaggagtgaaaattgctggggcctgggctggggctgctggaaagggagggcgagggctctgccgtccctcgggagggggcaggatctaggtggcagatgggggcgtcaaagggtcagcggccggtgggagctgcagctgggatctcaaaggggctgaggctggggctgggacccaggaataggcagtccccaggaaatacaggcagagctgggctgagagagcatggctgaagccaggaccaggtgaggagagagtgaggcagaggttagaggcagtgggggttcccaaggacatcaggacattagaggacaaccgcacagctgagggagtgtcagagcatccaggagcatgcagggctcgagggcaagcctcaaggagtgggtcggcgtgttcaggggcgtttctgtgaacactggggtgctagaaatgcatcactcagagaaattgtgtcaaggggtcaaggagaatctgggggtgtcctgcaccccaaatcacattcctggagtagcaggacgtctggggcaccctgagcaggggcagatagagcatctgggaggaggtgaggccccccgagttaatggcggtggggtatctaaggatatcagtgtctgctggggagtcaggggtatccattcagcaggttggggcatcggggagcctgtgaaaatcatggcatgtgggacagacaccctgtaagcagatgggttgggtgtctgggaggaagtgggtacaccccatgaggggacaagggaaggtatctgggagagtgccaggagtaccccgaaggcatgtgggaccaggtcatcttggaggatgtgcgaggttgaagtgcctacaagcagctggggcagtgtctgggggcccacctgttctgtagggtcatcgtcctctggccgccgcggctcgtagaagtccagcacggtgtgggagcccaggctgatggtgctgacagtcgggtagtacagtggtccgtcctcgtggggctagggagtgggcaccagggctgggcagggcaggagtccacaacccccaccctctgggtcaaaggggggcttcccaagccagggacagggaggtgaatgcctgtttgggagatgtggctgcctaatgagtgagggtgggtacagagtcccctgccccagcacagctcagaagtctgagtggggggacacgggccgagggtgtgtggttaccatgatgccctccccaggcagatactggttcacgaggacatggttagctgggaggcctccaaagaggctgaggtttgacactttgtccacgtagcgctggagccatgggggcagccgctcaggaaccatccctcggggatgaggaagcccacctggggaaggcaatggggtcctgagggcccccctatagcaatagatcccccattagggattccacagtggctggaagcaccctgatcctctcagggacccctgaccgtttggagatagccactgggtccttcagaggtttcctcacttctccagaccacaggtccctttcagatactcccaactcatcaggaaatccctaatccctcaggacctccactgaccccttcagaatcctcctggctcttggggccccttgagctgtcagggaccctctgatgtcttaagtctattggacctgagtcccctgccccagcctacatcccagaatcactcctgcccccagccagggatacttaccccagttctgtaactttctcccagagagctgggtccactttggctttggggcattaaaaacctaagaggtgggaagggggtcactcctttctcaggatcacccctctatgatcctcccacctagaccaacataggggcctttacctccgggatggaaatgggtcatctgtgtctgtgggaccattccctggggcggtgggttcctaggattttgtggtttgccttttttcctgggaacgcctttggccccaaagcccacctgtgtctaccaggatttaggaatcagggctgcacaaccgtggtctgagagttgtgggtctcacaatctactcagagttctggggctggacagggctctttcagcccagcaaatagtctgcattctaatttcctgattccgtgccaaacctggttgctcatgcctgtaatcccagcactttgggaggccgaggcgggcagatcacttgaggtcaggagctcgagaccagcctggccaacatggggaaaccccgtctctactaaaaatacaaaacttagctgggcatggtggcatgcacctgtaatcccagctacttgggaggatgagacaggagaatcgcttgaacctgggaggcggtgtggtgtcacacgcctgcaatccaagctactcaggagactgaaacacaagaatcagttgaacccaggaggcggaggctacagtgaaccgagatcacgccactgcagtccagcctgggcgacagagcaagattgtctcaaaaaacaaacaaacaaaaattcctgattcctgggctctctgaggacagtttgagttctgcaaccgacttgttcctattgcctgggggagggagtatgcaaagctgggctatctcagcacagcaaagaaagtactttgaaaatcttccactgccaagatcctaatgatctagaatgggctatctcagtccaacaagtctagctctagttgataatctactcattcccttcatggttatggagctgtactgggctatttcagcccaggaattctataatatgtagatttttcaatgccaagaacgcaaaggtctggaatgggctatctcagcaaaaaagtctgtgttctgtagctaattttttcctggactcaagatcagtgggttactccaacacagggaagatctgtgctctgtaacttaggcactggggctgcaaagggcaggaactctgagctttgaaaattcttctttccccaaaccttaagaacagaatgcagactgggccatctcagcgtagatggtctgtatttggtaaccttattgtgctctgggtctatgctgggctattttagcacaggaaagagtttactgggctatctcagcacagaaatctgaatacaaaattctttactccccagtctcaatgatctgaactgggctatctcagcctatgtttataaccccctattctctaagctagcaggattgggctatctcagtagagggagtatgagctctgtaacttccttgttccttctgtcggggtcttcactgcagccttgggggctctcatacagaggatggacattggggaggaatatgggaagagtgggaaaacagaccagtagggcactgaggtcacctgtcgaagcaaatactcctcctcttctttggagatgaagtcagggacatagtagattacaggtggtgcctaggatagaaagaccccctgaaggtgtggcccttcaacccacacagaggacatatcatcacagagcaacccctatgcctggagacaggctcaggatgtcctcagacaggtcagggtctaaagtcaagggaccagtgccattccagaatggactctgacagtaagaatgaatttggtggaagggggcagtcccaacccaagaactcaggaatcagcctgcctccttcaccctctgcaccctgagttctgacaacctgctccactctgaacggttccagggctgggactctggcgtcctgctcctccatcaacaccaactccttgcacccaatcctgtagggaggggaggacatactgaagtcactaggcctcccgccctaacaccatgatgcagcattccaccccatcacaggccaggcctcacctcagccctcttctgaaacgcacttggtctctaaaatctgagtcttcagcatcttacaagccacacagagagcccctacgttccatgcccggacacaatgagccccaagaataatcccccattactctgtccactaagggcccatccaactacacatatgccttctcaatcctcccacagagaacattctctggccccacacacagggagcctttctcaaaagctctacacatagcccccagggctgcactccagagcccctttaaacaccttgagaccccgcttcagacctgcaactgtgagcccggctatcaacactcagcgacccccgccccccaccgaatcccattctgtgcactcctgtgaccccaatctgagcctcctcagacatgtccaccctcagcctcctcggatccccccatttggacgcccctcggatttcccctcctgagcgccccttcactccagcaccctgagatctttagctctgaggctgactcccaaatcttcttccctccctgaaccattcagatccccgactccgagccttttaggactccaagctctgagcctcctcggactcctactctgggctcccccggatccccactttcagccctattgacatccatctctacccccagcactccccaaaactgaccgtccaccagcgtcccctccaatttccaaattcaacatccccatccccctcccagccatttccgccccacattacagacgcagagtccgcaggccaatgggagctcccagaggcttcaagggcccgccttccacccaatcggcgctctcactcagtattcgcccgcccccttcatgctcgcctaaggataggccgcgcctcctggcctctgagccattggcaggagggcgtgggcggggcatcgtcgtctggcactggccactcagaacttaggaactgaacctggccattggcggagtggaccccgatgggtgggacgggggcggcagccgtgacagccgcgggaagacatgagaggctgctagaaggacttcccgcggccagcgccatcacctgcccacgccgcagggaggtgagactgaaggaagcacttcctttcccgtcttctcccagcaagggaaacccccaatgacccgacacagagaggccatagaaacgtctttattgaagaggacaggagtcatgctgagtttggggacatgcagtgaaggggcagtcgtgagctgtccttggtggtcggggccccaggtccgccctggaccccctgggccttcaggttctccctcgagctgttggtctggcccaggtgctgtggggtcctttgaggccagtgactagaacgtagattgaaatcggggttccaggatttgagatcccctcagggccttggggccttccatttattagagatggaggctttaggatttggggttcccttagggctggggctcttggaatttggtgtcttgaaacccatggactcggggcattgaaattctccagtttccagggatgggaattcctgtgtggggtttcctggtgcctgtgaatagggcttgaggtgtctgggagcctggaatgcatatcctgactgcagtctcctccataccaggcacaaggacctcatgattgggtttcctggggacttgggattggattttcaaatttgggattccctggggatttgggattccatgatttgggggtcctaggagttacggcattggggtcttctaggggctgtaggacttgagggcacaggggagtttgggacgtgtgtactctagggtttgggatccccagagtcctagaatggggcctccaaattttggggtcccccaaagggggaagtcgttacttaaaaaatagagaattttctgggagtctggccagcacaggagctgtgggccatgtggggtgggcttcatacaaggcactgggggtttcttgagggtgcagagggtaggaagacttggggggtcctgtaattagcacttccaggactgttttggtgtctgtaaattaggggtgacagtgggctggttatggtgggtttcttcttgagggataagaacaagggtctttgttaatgaaggaagtctctgattgaggggttggaatctaagggcttcagggtgaccatggggtcacgacatcttgagaggactgatgttaaatggggaacaatgacatgaatgtctgttactcttttgctttgggggtgtgacctatgtttatttcaagaggacttaaggggcagtgtttgttaatggggaggtttctgatccagggttgggtgattcaagaatgttctgttgtaatgcattatgtggagagggtcaccatcatttggggtgatatggaaatctgttaatctgggaatctgctctgaggggttggggatagggactagcctgaaggtgctactcagggaatctctttctgggtgacatggggtctgtatttgggggttattatgggagtatctgttaataatggggcctcaatgatcgagggctggctaacaggggtctctactctggatgtgttactgggaatctctatctcagggtgactcagggctcctcgggtgtcaggagatgctagtggggactctgtctctttgtcaggtgtccagggcctctaagactgcatctccgccctcagcatccaggggaaccagcagcagaacagcaacctggaaaggaggatgacagggtcacgcccttaggcaggcagcggggacatctgcacccatcacccccagcctttcccccagtgtttgctatcaggcctttctggattctgcctctacctctctggctgtggtttgtttgtttgtttgttttctgagatggagtctcactctgtcacccaggctggagtgccatggcacgatctcggctcactgcaacctctgcctcccaggttcaagcaattctcctgtctcagcctcccgagtagctgggactacaggtgtatgccattgtgtccggctaacttttgtgtttttggtagagacggggtttcaccatgttggccaggctggtcttgaactcctgacctcaggtgatccgcctgccttggcctcccaaagtgctgggattaaaggcatgagccaccccgcccggtctctagctgttgttctgaggctcgtatggagtgaagggtgttctgcttcctttaccggcccacccgaaagtggaattcactagaattcagtgcggggccctacaccctaaagactgtttctgggtatgcttacaagtcacaagttttcctaacctctctttccagccctgaccagagctccagacctctgggtccaactgccttatggatccctctccctgaatgtcacataggagaggggacaggggttggccacacacctggaaatggagttctctgatgcaatgtcctttggggtccggactgtggtgaaggtgcgtttgggctgcgtcactgaagaggagggcaggatgtcaagtgaggggatgacagaccacctgtgtcctcaatacccatccagaccccttctcattaatacctccccatgtctccagtccccacctggatcctacattcccaatacccatctgggcctcttgtccataattcccaccatgtcccccagtgactatccctgtccccagtatctgctcaacctcatgtccccgaagagccttgttgctaatttcctcatatcctctagcacctatctttttgtggaccttgtctcatcattttcctggaccctgtgtccccaattaaataccagagactgtcaccagtatatacctgagaacccatgacccttcctcccatccccaaacgtacactcctcccaacatatcatcccctaactcacttgtcacttgatgcacttttttggctccaacgctgtccccgggggaatcagtggatccgccaatcctgaggagacacggggagggggagaagtcagagccacaaaaggccagggtctgactgagagctgggccccagggatctatgaggaaagggctgggggctcgggggtgtccacactgtcctgctggtctgggaggaggaggccatctgaggggggatcagggctccaggtggtgccctgggtttgggctggaagtttgggctcacctctgaatacgggatgctggtgcgaagaccccatgcctcggggggcaagtgaagtaccggacaccgaagacagagccatcatgcttgcctgtgggctggtccagctcaatgccataccagtaacctgcagcacgagggtgtcaggatttctcaaggccctgcctgcctcccggcccagagtccccatcctcacctggggcaaagtctgtcttcccgtagaagcgcacgatcccctgcttctggcccgcgacaaggacctggtctccaacctcagccttggccccgtcacgctgctgcaagctgcccagagatggggatgatggggtcttcttcttgcctaagggtagaaggtgtaggaggtgggtagtggggctgaggccagctttgggaacctcgtgccacctggaaaaccccaaggtagaaaaccctgttcttcgtttgaagtgaaactgaatcccagatgccagagaattaggaaggggctttaggcctgaagggaaactgagtcagagaacctgaagaaccccaaaatcctttctcaaagctgaggatatgttggataaggaaaagctgagtcagaagtcaggaacccagaaactgtccttttaaaatgaagggaaaattgggtccgagagtaaatcaggccatgtgcagtggcgcaggcctgtaatcccaacattttgagaggccgaggcgggcagatcacttgaggtcaggagtttgagaccagcctggccaacatggcaaaaccctgtctctacagaaaaaaatacaaacattagccagatgtggtggtgggcacctgtaatcccagctactcgggaggctgaggcacgagaattgcttgaacccgggaggcggaggttgcggtgagccaagatcgtgccaccacgctccagcctgggcaacaaggcgagactcttgactcaaaaaaaaaaaaaaaaaaaagtagatcaaatgacaaaagacaggatctccaaggattcttccctaaaactgggggagacctttgggtctgagaggaaactaagtcacagagggcagggaacccacaggtccttctaagaactagggggtgccagtactgagccaaaggggaaactgagtcacagaagtcaggaactcagagcttgtcttccaaaactggagtttgggcctgaggagaaactgagtcacagaagctgagctacccacacaacatccccaaactggctcttcccaccacagggatcccctctctgacctttgtgttccctgcggcctttgccggtgacacgggagaagtccatccggggggtccggggtgtggaggtgacagaggaggggggtgcgtccactgccttggagatcttggacacggaggcaaagagacctaggggtacagaatccgagcctggtgttgtccaagcctctgccctcggcccccatcctccatcccctatttcccagtcagcagcatcagaactgccgagtggacacccagccacacccctcttgggcccgaggtcggactaaccctgcttgggagggcagatgaagtaccgaacgcccccaacgctgccatcgttcttgccctcaggttcgtccagctccacgcccacccactggccgctggcaaactccgtggtcccacagaaccgcagtgtgcccgtctggggagagaagggaggcgatggctaaggaaggaatgctgggaggccaacgtggagtgcccacacacgggcagcaaggtgggttgcatgaggccgccctgggcccaaaccccaggtcacacatcaccatttgctggctacatgacttaacctctgtgtgcctcaacttcctttgctgtgaaatgggaacagaaattatactcaccttataggattgttaaagagttgccctgtctcatatagtgaatagtgactagccacataggacaatgtaaatttatttatttatttattttatttatttttttttttttcgagacagcgtctcactctgttgccaggctcgagtgcagtggcacgatctcggctcactgcaaattccacttcctgggttcaagcaattctcccatctcagcctcccaagtagctgggactacaggtgcatgccaccacgcctggctaatttttgtatttttagtagagacggggcttcgccatgttggccaggctggtctcgaattcctgacctcaggtgatccacccgcctcggcctcccaaagtgctgggatcacaggcatgagccaccatgcctggccaacaatttaaatttaaactaaggccgggtgtggtggctcatgcctataatcccaacactttgggatgccaaggctggaggatcacttgaggccaggagtttcagaccagcctgggtgaaaatggcgagaccctctaatcttaatctgttccaaaaaacaaagacagcaagaccctattctctataaaagaaagaaaaaaggtaaccaggtgcagtagctcaagcctgttgtcccagttacttgggaggctgaggtgggaggatcgcttgagcccaggagttcaagggtgcagtgagctatgatggtgccactgcactccagcctgggcaacaagcaagaccctgtctcaaaaataaataaatacataccttagaaagaagactcagatgatttttaaatttaaaaataaataaatttagtccgggcgcggtggctcacacctataatcctagcactctgggaggccgaggtgggaggatcacctgaggtcaggagttcaagaccagcctggccaacatggtgaaacccccatctctactaaaaatacaaaaattaaccaggcatgatggtgcacgcctgtaatcccagctactcgggaggctgaggcaggagaattgcttgaacccaggagggttgcagtgagcccagatagcaccactgcactccagcctgagcaacagagcaagactctgtctcaagaaaaaatataaataaataaaaatacaaatcaatacatttaaactaaattaaaaatgcatttccccagtcacactagccatatttcaagtgctcaattgtcacatgtagcttgtagctactttactggacagcacagacagaatatttccaccattacagaaagctctgttggacagggctgttatagagaaattaaagccctcagaacagggcttggtattaagtaaaggatcagcaagtattcgttattgaaattttttttctattttagagacagggtctcactctgtggcccaggctggagtgcagtggtgcaatcatagctcagtgtaaccttgaactcctgggttcaagcaatcttccctcctcagtctcccgagtagctgggactacaggtgaacgccaccaaagcctggctaattaaaacaacaacaacaacaacaaacttttgttaaaaatagaaatggagtatccctatgttgcccaggttagtttcaaactcctggcctcaagcgatcctccccatcttggcctcccaaagtgctgggattacaggtgtgaagccactgtgctcagcctgttagctattatcatgctgtaactttggtcaggggacttattgagcctcagtttcatctgtaaaatagagatagtaagccacctcatggagtgatcatctggcggaaactttttttttttttagacagggtctcactttgttgcccatgccaggggtgcagtggcacgaccctggcacagtgcagcctcaaactcctgggcacaagtgatcctctcacttcagcctcccaagtagctaggactacaggtgtgcgccaccatgcctgattaattttttcattattagtagagatgaggtctcaccatgttgattgcccaggctggtcttgaactcctgggctcaagcgatcctctcacttcagcctcccaagtagctaggactataggtgtgtgccaccatgcctggttaattttttcatttttagtagagatgaggtctcac[131 bp omitted]agctgcagtgagactttagtgagtgtggttattatcattatgggaggctcattcacctctccatgcctcagttcctggtccatataataggctaattaattagtgctgatctttttttatttttatttatttatttttttttggagacggagtctcacactttggcccaggctggagtgcagtggcatgatcttggctcactgcaagctccgcctcctgggttcatgccattctcctgcctcagcctcctgagtagctgggactacaggcacctgccaccatgcctggctaattttttgtattttttttgtagagacgaggtttcaccg[132 bp omitted]ctagaacagtgcctggcacacacaaagagcatttagtatgcgctggactctgttctaatggccttacgcattttaattaatttaaacctcaaccagccccctaaggtggttactattattatctccatttacggatgaagacattgacacccaaagaggcagaatcactggctccaggtccacaggtgggaagttgcaaagctgagatttacctgggcaagtccctgagcctgagttcatgacgctgtgctatgctgcttctctaaggggcagtgattagtattccgtgtcttcagataaaggttttcacctgttggagcctcttatagtctggcttgtaaaatgggaagagtcaacccaaccttccttctgaattgtgcaatggatatgattagatcgtgcacagcagaatgctttctggatggggccgggcgcagtggcttatgcctgtaatcccagcactttgggagccaaggcgggcgaatcgcttgagggcaggagtttgagaccagcctg[185 bp omitted]atggtggtgggcacctgtagtcccagctactcgggaggctgaggcaggagaatggcatgaacccaggaggcagagcttgcagtgagctgagatcgcgccaccgcactccagcctaggcgacagagcaagactccatctcaaaataataataataataatcataataataaaaataaacccaggcttgttggcacacacttgtaatcccagctacgtgggaggctaagacatgagaatagcttgaatctgggaggtggaggttgctgtgagccaagatcgtgccactgcactctggcctgggtgacagcaagaccctgtctcaaaaacacaaaaacaaaattcaaactccttccagtagcctacaggtctgctgtgacccagccttgctgacctctccacctcaccgcccttcccataactcccctcgtcaacactgccccttcctgcctctgggtctccatacctactgcatcctctgcttccttatctttgcaaaggaagttctttcctatctcagtttggacatcacctcctcagagaagccttctcagaacaccccagctaaaaccactccagcattcagccagggacaatttactaaatccaaacatgtaatggtgttgacagcccttgttgctaccagaaattacctttttttttttttttcaatagaggcaggatctcactatgttgcccaggctggtctctaacaactcctgacctcaagtgatcctcccacctcggcctcccaaaatgccgggattagaggtgtgaactaccgtgcccagcccagaaatcatctcaaccataggtttactttcttgactgtctccccttcattacaagtggagccccatgacagcagggcgggggcagacacagccctccctccctaaggacagactgggtcccgtatggagcccaagggacaccgggaaatgagtgaaattggagtccctggataaatgaagattctctctgccctctcagctgtgatacccgctcccccaagctgagactcctttctccctttctttccctggcttgctcctccacatctgcaatttgggtacattccccatcacaccccaatcactctggcctggacttgcctagccagacttgtctctgagagcagaggggcctgatcgaggaccacaagacccggggggagccacaggtgcacagagctgcgcagatcactctgctcacccctccccatggcagccatgaccactctcggccgtcactgtcagatgacgggttgtttcccaccctggatggagagctcagcacagggtgaggctcaaaggagacacccacggaacaactgagataaaatcaagtactgggtggatagttagggcggcaagtagacaaagggcagggactgcactctgcccgaggacgcagctccaagggattaaggggctgagtcccacccccacccaccatgcaaacacacatcccagcccctgaccttctggccatccagcagcacgcggtctcccaggcgcaagcccagtgcgctaagcatgagattgcctgggacgttgtcatagttgggtagcgtgaccttggggagggcgcaagatagtggcactgcctcttccagaagcgtccgcagctccttggccaccagtgccgcctctgccttgtccagggacatgtccataggatctgggaccacctccgccggcacctgtccttttcgattctgggggccaatgggaaaagaaggcagggactcagtggcacaggtcacacccccatggaggccctgcccctagagaccaccagtctgggtgatgcaggggtaagactaggtcatatcctgggccaacctgggaataagaagggtcagggcaaggcggggtaaggtggctcacgcctgtaatcccagtacgttgtgaggccgaggcaggcagatgcttgaggtcaggagttcaagaccagcctggccaacatggtgaaacctcgtctgtactaaaaatacaaaaattagccgggtgtggtggcgtgtgcctgtaatcccagctactcgggaggctgaggcaggagaatcgcttgaatccgggaagcagaggttgcagtgagccaagatcatgctactgcactccagcctgggtgacagagcgagactccgtctcaaaaaaaaaaaaaaagaaggggcagggcagaaaggtgcagaccacatccccagggaaacccacccctgagacccagggctgggggtgtgtcaagtaattgagggtgggcctgggggtgtaggcagtagggatgagggccacacttcagtgctgtaggtcacgccctcagggaggcaatctctggagaccccaagcctgtaatgaggacatgtgggagatgaacattgagaatgggctcctgtgggctgggtgcagtggcttatgcttataatcctagcaatttgtgaggccgaggtgggcagatcacctgaggtcaggagctcgagaccagcctggccaacatggtgaaactccatctctactaaaaatacaaaaattagccgggtgtggtggcgcatgcctataattctacctactcgggaggctgaggcaggagaatcgtttgaacctggtaggcagaggttgcagtgagccgagattgcaccactgcactccagcctggatgacagagccagtctctgtctcaaaaaaaaaaaaaaaaaattagagagagtgagagtgggctcctgtggtatagagtcaggagtcaaactctgggccagtggaaaatggggagaggcagggtctcaggggcacaggccatgttaccccaacatacatgtgcctggacggctgcagggtaattagcattgtggatggagcctggtaatgcataggtcagaggtcaaagatcatattgagggcttaggagaggaccaaccctctcattcacagaaggcctagcccaactttcctcatgaccttgaaatgctgttatgcactgccatgggataggctggatgaccctgggcagatcccttaatctctgcctcagtttccccattgtaaaacaaggcttataatagacttcacctgacatgtaatgaacactaggcatatttcagctgttattgcatttgctgaatgtacagacggcatttgtagtatttggggagtcacgggaaacgcagagacctgctggagggaagtgggggaggaagggagcaggagggtaacgggttctgggcaagggtggcagtaccctcagcgcagggttggcgccgtgctccagcaaacatttggcggcgcccaggcacaggctggaagcagcgatgtgcagggctgagccgtggttgaagtcactgcacgtggagttcaccactggaagtgggcaagaggaggggttccgggtgagcgcctgtgggaccccagccctcctcccacctcggggctcatctcttaacttgcaggtcccagagcctccgacgcagagccccgcccccacctcggagcccccctctcccttggcagccccgaccctccctagagtggtagtccctgagccccctctcccacgcctccaacctcccgctatctcctcagatcaccgtcctccttcccctcgcagcctggcctcacctgggtctccgcgtccctcacccaggtccttgccccctcccagccagggctctcctcctcacctcgcggcctcgcacccttcagcagcacacgcacgaggtcgggcacatcaaaataggccgcgtagtgaagcgcgttcatgttggtccagcggctgcgcagcgtcacatctgcgcccagcgccagcagctgctgcgagaggcgcacggctgccgcggggtcccctgcgcgataggccgggtcagcttggaacccccattccagagcatgggcccagtgcacggggaggaccctgggcttcagggactatactttgggatccgaagcttcgggttccagatggggcctgagttctgggtggttttcagcgtgttgggtctgggggcctaggctttggggcttatgacttgggggtagggggccctcaccgactccgtgggccccagctttgcacgcatagtggagcagtgtcatgtcggtcagcccgtcacgatcgttcacatggcagcctcggcgcagaatctgtgagtaccaggggagcagggagggtcacccacacatgtggggaaccgcatcccctctccccctggtttccccagtgttctcacctcattgccgatgacgtctatcttgtgctggacttggggcacccactggcgcacaatggcaaacagctcggggatggtggtctgagggtcaaacaggatctcctggcacgccgggtcattgggatcgaagaaggtgaaagctggggtggcaagaggtccaaggtcaccccacgcaactgaccccctccttccagcctcagtaggggagctgtaggtctttgccttttagagcctctaatgcagggtctcaagctggtggcacatgggccacagtcaacccacaggcattttctgtgtggccagcatgaggtttcaaactcaggtgggttcacataaaaatctcgatgcccagtgtgtcttgaaaagttggaagatcaggcaattcccatatagcagcaaactccaccccctgaaacaaaagcctgacagagagtgcagtaccttggagtctgcatgtccagggggactgctactgacctcacccactgttgccctgtgagagtatgagtgaagtttggctgaatctccagagcaaaaataaataaagccagaagtcctggtttttaataaaactctctcaattgtttcaaataccatgcagtccacatcaaatgtatccatgactgggcacagtggttcacatctgtaatcccaatgcgttgggaggctgaggcaggaggattgcttgagcccataagttcaagaccagcctgggcaacatagcaagacccctgtctttacaaaaagttttaaaattagccaggtgtggtggtgcgcattggtgctactcaaggagattgagacaggaggattgcttgagcccaggagttcaaggctgcagtgagccatgattgtgccactacacgccagcctgggcaac[133 bp omitted]tggtccaacgtggtgaaaccctgactctaccaaaaatacaaaaattagccaggcgtggtggtgggcgccggtaatcccagctgctcgggaggctgaggcaggagaatcacttgaactcaggaggcaaaggctgcagtgagctgagatggcgccgctgcactccagcctgggtgacagagagtgagactccatctcaaaaaaagtaaataaataaataaaaatgaaaataaaataaaatgtatccatgagcaggaatcaacctgtgcccagccagggtggtgcctagaggcacttctgtctcttcccactcgactctaaggagtactgctctctgtgacgtcagcacccagcacagggccctggcacgtggcaggaactcagtgcgtggtgaatgaacgactacatgaatgatcagattatacacagcccagggaagtgccacatagaaggtgtctccaggaatcagccggcatgctccttttagaactgcagtcacatcatagcccttcttggcttagaaccctcctccagctcccaacccatccagagtacagaccaaagtcttccccacggccctcagggctctgcacatccagcccctcagttctcagccctctcccctcacttattccccttccctcatttcccacactgggctccctctgtccctcccacgtgccaagcaaattcttgtctcagggtcttggcacttgctgttcttctcactcaggatagacttcccacacatcttcacaaagctttataaatctttgctcaaatgtcatctcctcagagaggccttcccaaaccacactgtctaaatcggcacccgcccttctccatctcctactctttttttttttttttttttttttttttttagagatagggtcttggctgggcatggtggctcacgcctggaatcccagcactttgggaggccaaggctggcagatcatgaggtcagcagttcgagaccagcctgaccaacatggtgaaactccatctctactaaaaatacaaaaattaactgggcgtggtggtgagtgcctgtaatcccagctactcaggaggctgaggcaggagaatcgcttgaactcggaaggcagaggttgcagtgggccaagattgcaccattgcactccagcctggagtccgtctcaaaaaaaaaaaaaaaaatagggtctgttggaatgcaatagtatgatcatagctcactacagccttgaactcctgggttcaagtgatcctcctgcttcagcctccctggtagctaggactacagtatacatcaccatgcccagcaattttttttttttttgtagtgacaacgttttgctatgttgcccaggctggtctcgaactcctgggctcaagtgatcctcccactttggcttcccaaagcactgaaattacaggtgtgagccaccatgcccagccctttatttatttatttatttttatcatagctcatatcactacttgacatgtttactcctctttctccctccttcatttcctctcttcttccctcactaggatctaaatgctatgattctattctgcctcattcactcctttatccccaaggccaggcacagcacatggcacacagtaggtgctcagtcaatctctgttgaattaatgtacaaatttaacagatacatgatttcctcttggagtccaccttagccttctccctgtcctcgaccacatttccagatttcttcacattctgggacaaaacctctcccgctctacaagcaagactgcttggagggctcagcctataccctccgacctcccactgagtcagaggccccagccacctccagctgcatttccaaaggagattttccagttttctgaggtacagcacccccccgacctcaggccccagataacttccttttacttttttctttttttgagacagggtctcactgtgtcacccaagctggagtgcagtggtgcaatcctagcttactgcagcatcgaattctcaggctcaagtgatcctcccacctcagcctctggagtagctgggactacaggtacccaccatgcctggctaatttctaaattttctgtacagatggggtcttgctccattgcccaggctgatctcgaactcctggcctcaagcaatcctcccaccttggcctcctagagtgctaggattataagccagaaccactgtgcctagccaactttcttatttttctattagactgaagtcaacttgtagtctccctgatctacctctagtgggtgacatgtccatggatgccatctgtcttgctctatcctggcaacgctgactctctgaacctggtttctgaacctcacagctgccggggattcccagcctgcatatcttccaaattcccctcctacatccaactctggctgcactccatccccttctacccagtacccagagggagctttcaaactacaaatcagacctgccactcctctgctcttaaacaccctccccttgccactcttctcccctgtcccacttagaatataaccaaagtcctcactgtagccttgaaggcccttccagatctggcctatgccaacctctcacctcaacctcgatcattccctgaatgcagctccaggatctttctgttccaagttcaattctgcctcagggcctttgcacttgctgctgtctgcctggaacactctttttccagctctcttatggctgattcctccccatgctctgggtcccaaactaaatgttacctactcagaaagagcagccctgactacccctgcaggtagctgccccctagtcattatcgtatctccacctttaatttctttttcttttttctttttttcttttcttttttttttttttcttttttttttttttttttgagacagtcttactctgtcactcaggctggagtgtagtggctcgatcttgggcaacctctgcctcccaggttcaagcgattctactgcctcagcctcccgagtggctgggattacagacatatgccactatacccagccaatttttgtatttttagtagagatggggtttcacc[136 bp omitted]tgaatttatctgatttctgatttatttatctgttcacttgtttagtctctccttctctcctgcaagggaggatcatgcctggatcacttaggattaaatctccggcacccagcataaggcttgtcacagagtagcagcactcgataaatatcgctcggtcaatgattagacactttcagtttctccaagaggccgccctctcagctccataccctcctacctcagatcctttacccagcggttacctctcctgggagccctttcccctgacccttctcttagttaaccccaactcaccctccagtcttctcaactgtaacctcctcagggaaacaatgtcttaaaaaactcttgcagcagcttgtttatggtaaatacaattttcataatgtcttgtaattacatatttatattacattatatttttctttcttgcatataaacctaaatgtgaaaaattacattatggtttaatacctatttgtgtggctgttactgaggcctgtgagttgtctcagggcaaagactgggtctctcttgccccctgctgtggccccagcccctagcataaagccaggtccacagccgctttcaaaaaatgattgttgaatgactaaatgatggaatgatgtgtcatgagtcaaagactaggagtattacaattccattctccaatgggtgaatgaatgaattaacgaggggtgctctgcagccaagattcctctggaccaccttcaaattccccagaattctcccaccatcaccaccagcagagcacagcccaccctccccggccacccaacgctccaggccagattccagggtggggacagtggttaccgtagtccttagggaggggggcaggtgccgaggggtgcacaacaggcttctgccggcgctcctgggtggggctgggggcctcggggacgggttcatcctcctcctcctcttcttcctcctctcctcggggtggcggggccatcggggcaggatctgtcttagtcatggtcctcggtggccctcggggggcgggtgcagagttgggggcagccttcaggcaaatcctggaggcagaggtcagctggagagggtgcccggcaggctccagggtccaagcccctaggagcttccagggccccgggtggcctccgcgcaactggatcttgggcaaccatagggacccccgttacccatagagggccccggtgtgtgcgcccagcgcctgccacctcccccaggcccagccccccattcttctcctcccgcgtcaggcccctcagtcgcggctgccccctccccgggtttgtttatctcgggattcaggatgcttcgcccctccccttctccgcgggccgccccctccccatcttacctcgggcagacagcgctggggaccaaagtggagactggggagactgtgggagcaatggggtgtcggtgtcaggggacgtgatgggggaggcaagggagacagagagaaggggacgaggcccagacgccgacagggggtgggggcggagagggaggggcgcgactgcgcatgcgcctgctgcccccctaccggcggcgggggaggagggaccaggaggagggaccgggaggcgctcgcattgatggaggggccagaggcggcgactgaaaggggagagcctccgggcactgggagaggaagagatggctacggaaaggagcgagatgagcagatacaacggcaaaagagagggctgagagagcggacacagatcttctccatccccttcccccacgcctgcaaaccaggccggtgagggcagtggtcttggggcgtggtgacgatggggaccctctaggggaccctctctctaggaccctagaccggaccccttctccaagctcaccattcataatgggtgcctcagaggggtgatttcctagagactcctatcatgatcatctcatccttaccatcataatgcgaggctcacacactggggcccagaggttaagcagcttgcccaaaagtacatgagtaggtgatggagcgaacatttgaaaccagacagtctgtaaagtctgatttttatttttattatttcctagacagggtctcactctgtcacccaggctactgtgcagtgttgtgatcttggctcactgcagcgtcaaacttctgggctcaagccatcctcccacctcaacctcccgagtagccgagaccacacgtgcatgccaccatgtctggagaattttttttgagacagggttttgccatgttgcccaggctggtcttgaactcctgacctcaagggatcctcctgcccctgccacccaaagcgctgagattacaggcacgagtcaccatgcccagctttgattcttaatcaccatgctacatgcctgtagcagtgtctgggaaacagatctgccgattgacccctccaactctctcagaacctgtatcttccccacggaggcctcctgaagccagcccagggtcctggctccattgtcatggcttggcttcccacctggagctgtagcctgctctgcctcaaatcatcccagcctggatggggctgggtgacagccttgaacacctcatccttctaatgcacaggtccagtagctccatctccaaaagatttccaggatctcactctccccaccgctaccctgggccctcatcttggtccatccttcttcttctgccaccagcactacggcagcagcctcttacctgctgtccccgtcctcctccaacatgcagccacagggacccatgaacacctgtcactttggagccctctttccctcagaggggtctgcctgctgcacctcactccaggtagaagccaaggctctcagccatggcccacaagggcctatgtgaacctgccccatcatctctgcactcacctcctctcaccctcttttgttcactccaccccagccacactggcctccttgcttctccctaccccaggacctttgcactggctcttttttttttttttttttgagatggcagtctcactgttccccaggctggagtggagtggcatgatctctgctcactgcaacctctgtcttccaggttcaagtgattctcctgcctcagcctcccgagtagctgggattacaggcctgtgccaccacacccagctaatttttgtatttttagtagggacggggtttcgccatgttggccaggctggtctcaaactcctgaccttaggttatctgcctgcctcagcttcccaaagtgctgggacgacaggcgtgagccaccgtgcctggcctgcaacggctctttgtgatgcccggaatgctcttcctccaaatccctacgtggctccctctctgccctgttttaggatcttacttgttggtgtcttttcaccttctctgctctaaaactgcaccccttcctcccttccctactatggttttctccatagcaacaccgcctcccagacctgacacatcccagacagcaggccctcactgcaggggttgttcgtcctctggaacctgagcctgtagcgctccaggccagccccttctgatcacccaggtttctgctaaaacatggccttggagggccctcccccaggcccaaaccaaatttttgttgtctttatagcactcatcgctcatgtctgcagtgttcttgtttatttgtttactagttcatcgtctactcaagtagaatgagcaccatgagggcagggattttctcagctgtgtccaccatggtatcatgaactcagtaccaggcttggcaaaaagcgtgggactccttagaaccaggtatgattctcccaaacaacccttgctctgctctgaggctgtcgtactgatttgcaaagatctgagccgggggtggcagaagcctggtacccaggggattgggggctgatgagagacttgggcccaggtcacccctaaggttcaagagatccctaggagtggggtggtagaacccaggcccttgagggaggcactgctactacccaggcgtgggcggtggggctgggccaagcccacgtataatgtctttcctcctccatcttctatcttttgtccctcgacattgtctgtcttgatccttatgcactggggatccgagtgtccaggagctccggcttggcatccactgtggcaggtgcagggtcctgggcaaggaccatggctatgtcaggccctccacagatgatggtgaaggtttgggattcctcaggtccaagggtctgggctgttgtctaaggcaaagaagtggtagagatggggaacattacgaagcaagttgcgggagagacagacagataacggtgaggaacagggaggcaaaggtggcaggagggcgtgtcaggaaacagagagagatgtggggagagatatgaggagacaggaaagcagatgtgagggccagagagacattcatgggaaaggaaagaagggtggggaaatgggaagagaagtgcgggggcacagacgcagacacgtgggggaaagagatgtgcaggcagacagacgtacagacagggtcagagatatgggggagacagaaaatatgcagataaagagagacacagggaggtggggaaacaggtggcggacagagatgatgggcagaaagacaatgaatgttggggagggaggagattgggaggtagggatagatgagtaggagacagagattgaatgacaggaggggaggcagagagaggcagtcagctcaggggatctggcaggctccacaaagagccccaggcccgagtctgagctctgtccctgccccactgtccctctgtgccccaggccacagtctcaaacttcaaggccccagaggcagccacactgtagctccagccaactgctatcacctgagaatccaagcccagtgctgctagatatgcagagccttcaggaaagaccagactttttttttttttttttttttgagacagagtctcacagtgtcacccaggctggagtgcagtagcacaatcacagttcattaaagccttgaccttctggactcaagcaatactcccacttcagcctctcaaatagctagaactataggtgcaacacttggctaattttttgtgtttcttgtagagacagggtttcaccatgttgcccagtctggtctcaaactcctgggctcaagtcatctacctgcttcagcctcccaaagtgctgggattacaggtgtgagccactgcactcggccattataaattattttaaagcactgcggaggccaaacaaattgtatctgtgggtcatgtccaaaccactgactatcaatctgagactcctggctgggcatggtggctcatacctgtaatcccagcactataggaggccgaggtgggctgattacctgaggtcaggagctcaagaccagcctggccaacatggcaaaaccccgtctctactacaaacacaaaacttagctgggcatggtggcacgtgcctgtaatcccagctacttgggaggctgagacaggagaatcgcttgaaccagagaggcagaggttgcagtgagctgagatcgcaccactccactccagcctgggcaacagagcaagactccttctcaaaaaaaaaaaaaaaaaaaatcggatactccttaactccagaggtactgtgggggctccttcctgagccccttcagtgagtctagcattcagagctctgtgtgggcatctctctcatacaagcagggctctgaaagccatgggggctaagctgggcacctcaagcttggccctagggttttaagacaggagaaatttcgccttggtcaaactgtgattttcagagacataacaccattcctcatcttcctcccccgccaccccacacacagagacataacacccttcctcaacttcctcccctacacacacacacacacacacacacacacacacacaccttcctcagcttcctcccctacacacacacacacacacaaacaccttcctcaaattcctcccctacacacacacacacacacacacacacacacacacacacccagcagtaaaatatagaggcaaaagggattcagatagggcctgggggacactattacagagattgcaaactccagctctataggggccaggcaggaagctctcacaggcctcttctgcagccagacacctgggtttgaatcctggccctgaaacatgttggctgcctgactgtgggcacactactggactgctctgtgcctccattttttcatctggaagatagagacaacagcagtattaagattataatgaggttttttttgtttgttttttgagatggagtgttgctcttgtcgcctacgctggagtgcaatggcacaatctcggctcactgcaacctctgcttcccaggttcaagcaattttcctccctcagcctcccgagtagctgggattacagacgtgtgccaccacgtccggctactttttgtatgtttagtagagatggagtttcaccatgttggccaggctggtctcgaactcctgacctcgtgatctgcccacctcagcctcccaaagtgctgaggttataggcatgagccaccacacccggcctttttttgtttttgtttttgtttttgagatggcgtctcgctctgttgcccaggcttgagtgcagtggtgccatctcggcttactgcaacctccacctccagggttcaagcaattctcacaccttagcctcccaagtagctgggattacaggtgcgccaccatgcccaactaatttttgtatttttagtagagacagggtttctctatgttacccaggctggtttcaaactcccgaactcaagcaatctgcctgccttggtctcccaaagtgctgggattacgggcatgagccaccgcacacagaccatagtgagttttttgtttggttgtggtttttggttttttttgagaccttgcttggtcacccgggctagagtgcagtggtgcgatcttggctcactgcagtctctgcttcctgggctcaagggatcttcctgcctcaggctcccaagtagctgggaccacatgtgcccaccacaatgctaatttttgtgttttagtgagacagtcttaccatgttgtccaggctggtcttgaactcctaggttcaagcgatctgcccaccttggcctcccaaagtgctaggattacagatgtgagccactgcattttttaaaaattaaccttgtagcagtcaggcatggtggctcactcctgtaataccagcattttgggacgccaaggcaggtggatcacgaggtgaggagatcgagaccatcctggctaacacggtgaaaccctgtctgtactaaaaatacaaaaaattagctgagcgtggtggcgggcacctgtagtcccagctacttgggaggctgaggcaggacaatcgcttgaacctgggaggcagaggctgcagtgagccgagattgcactactgcactccagcctgggcaacagagcgagactccgtctcaaaaaaaaaaaaaaaaattaaccctgtagctccagctcaaagggtcatagtgagttttcagctcactatgttataactctgtgtctggcagacaataagagcttctcaaatattaagtatttagtattagtaaatggagcaatcattactcagctccaaccaatagttgcttggcattgccagattttgtttttcaggaaaacctagaaatttgttttaattttctgtagagacagtgcttgctatgttgcccaggctggtctcgaactcctggcctccagcaatcctcctgccttggcctcccaaagtgttgggattacaggcgtgagccactgagcccgggaaagccagaaatttggaaacacggctgaatgttctgatttttgaataggggatcctagacaaaatgaaaacacactgcaggccaggccaccacccatggatggggctgccaggctggggtgccactcaccaggcgctgcagaccccggcgtgcccgtgccagcaggctctccccgtgtagctgctgtgccagccgttccagggcctgcagctgcgcctggtgccgctcctggcaccgttgcagcctccgcacccggcgttgcagtgctcccagcactgggcccagcccggtctgggcctgttgggcagggacttcaggttgtgaccgctcaggagttggcgcaggggccaggggggtcaggagcatggtggccacagtcttggggctccccgatgtggggcccagcaccactaggcgcactgggccagagactgggatggcagggctctggggcaggggtgtattcttctgtaggggaggcggcggcgagactggcttctgggtgcttcgggtcctccgctgactctggaagacaaggcatggggtgcaggggtgccgtggtcagacttcgactcaggaggaaagggatggagggtctgtttccaagggggacttgcctaggtaaggccagacctcagggaggaagtgtcgtcaggaggggagggccaaagttcagactcaaggagggacttcccttaggcagggaggtctgggggttggattccagcagcaggacctcccagcgctcaccttggcaggtggtccccgggagaagatggagggcactgcatcaggccgcaggtagcgcacaccccagcgccactggaagcaggagggtgtgaagtgctcgctgcacaagtgctggtggcagctgggcacccagtgctcacagcccatgtgctgcagccaggcctgcagccggggaccatccttcagtgggaacctgcatgggtggttggggggctgggtcagtgctacgaggttcagacttatccctcccagaggatacccaccctggaggtctctgggctccaagcctgtgcctccctagggctaggaagtagacctgtcttgtgcccaggctttctctatctcatacacacaaccacaacccttttttcagcttcatcttttagtagtagtattttgtgagacggggtttcgcacttgtcacccaggctggagtgcaatggcgcgatcttggctcactacaacctccgcctcctgggttcaaacgattcttctgcttcagcctcctgagtagctgggactacaggcgcacgccaccacgcccggctaatttttgtatttttagtagagacgaggttgcaccatgttggccaggctggtcttgaactcctgacctcaggtgatccacccaccttggcctcccaaagtgctaggattataggcatgagccaccaagcctggcatttcttcttattattattaatttgaaagctccaccttttaaacacccagcatcagcccacctctgccccctccactgcccctccttccagcctccttcctggtcttcctgcccacagtcccgcccctccactcccaatttgttcttccacatcaacttgttggagcagtttataaaatcagacagttacgatgtgggagatcgtgcagccaagcgaaaacgtttcttccacaccatataaatgggggtgtggggtttctggattaagagagatttaagaaacatcagcacaaacgcaggatgtggaccttgcctacaacaaacaattcagtaaaaagacattttaagacaattggggaaaactgaacatgaactggttataagataattgtaagaaactggtcaggcatggcggttcatgcctgtaatcctagcactttgggaagacgacaaggtgggaggatcgcttgagcccaggagttcgagaccagcctgggcaacatagggagacctcgactctacaaaaaaaaaaaaaaattagccatgtatggtggtacatgcctgtagtcccagctactcgggaggctgaagtgggagggtcacctgagcctgggaggcagaggttgcagtgagccgagattgcgcaactgtactccagcctgggtgacagagccagaccctgtctttaaaaaaaaaaaaaaaaaattcattttgctaggtgtgataactgtattggtttatacttctgaaacagtcttctgttagaaatcagtctgaaataattacggataaaagatctgatgtctgggatttactttaaaatagtgcaggacaaaaacttagaggtgtgggcagggcagggaagaagattggcaaagtgttgataactagtgacacagtgatggatactgagggctctactttttgtgtatgcttgaaaacacccactaacaagtctttaaacaactcaacaacaataaaacacaaataacctgattcaaaaatgggcaaaggacttgaacaaacatttctccaaagacatacaaatggccaataagcacatgaaaagatacttgacatctccaatcattaggaaaacgcagtatcagaaccctgatgaaatatcatctgacaaacaccagaacagctactattgaacaacaacaaaaaagaggccgggcatggtggcttgtgtctgtaatcccagcactttgggaggctgaggcaggaggatctcctgaaggcagtagtccaagaccatcctgggcaatgtagcaagaccttgtctctacgaaaaaatattttttaaattagctgggtgtggcaatgtgcatctatagttctatctacttaggaggcaatgtgggaggattgcttaagctcaggaatttgaacgctgcagtgagctatgatcacactactgcattccagcctgggtgatggaggaggaggggaaggggaagggggagggagtaagagggggaggaagaggaagagaagaacagtgtgtgtgaggatgtggaaaaactgctggaactctggtacactgctgggaatgtaaaacggtgctgccactgtggaaaacaatatggcagttcctcaaacactgaaaaatagaattaccatatgacccagcaatccacttctgcttacatacccaaaagaacacaaaacagggtcttggagagatattt[131 bp omitted]tgaaatcttgtctctacaaaaaatagaaaaattagccagatatggtggcatgtgcctagaggcacagctactcaggaggctgaggtgggaggactgcttgagcccaggaggttaaggctacagtgagccatgatcacattactgcactctagcctgggcaaaagagcgacatgctgtctcaaaaacaaacaaacagacaacagaaacatagcagcataaatcacaacagccaaaaggtggaagtgtctatcaacagatacatggataagaaaaatgctgcatatacatacaatggaattttattttatttagtcttttttttggggggagggaggagatgcagtctcactctgtcacccaggctggagtgccatggcgcaatctcggcacactgcaatctctgcctcctgggttcaagtgattctcctgcctcagcctcctgggtagctgggattacaggctcccgccaccatgcccggcttatttatttatttttgcgatggagtctcactctgttgcccaggatggaatgcagtggtgtgatctcggctcactgcaacctccgccccctgggttcaagcgactctcccgcctcagcttcccaagtagctgggattacaggtgcctgccactgcacctggctatttttgtatttttagtagagatggggtttcaccatgttggccaggctggtgtcaaactcctgacctcaggtgatccacccacctcggcctcccaaagtgctgggattacaggtgtgagccactgcatctggcctggaattttatttagtcttgatctgacacatgcaacaacacagatgaactctgagggccattagggtaagtgaaataagccagtcaaatactgacgatttcacttatatgaggtagaacagtcaaattcctagagacagacagtggaatggtggttgccaagagcctgggggagagggaaagagggaattgtccaatggggatagagtgttttaggagaggaaaaagttctggagattggttatacaacacttaacattagtgaattgtacacttaatgatcaaaattgtacacttaaaaatgatcaaaatggtag[138 bp omitted]gttcaagaccagcctggccaacatggtgaaaccccgtctctacgaaaattacaaaaattagccaggcctggtggcgtgtccctgtaatcccagctactcgggaggctgaggcagaagaattacttgaacctgggaggtggaagttgcagtgagtcgagatcacgccactgcactacaacctgggcgacagagcaagactccatctcaaaaaaaaattttttttgttttaagttttaaaaaataaaagctttctcagtggttgtgggtgaggattatctgatgagggaccctctaaatgtgccccacttctccggtttccgggtgccacttattcccagcatctgctcttaccctcttagatggtaatccactctctatttagacctgggctcaaggctacccataataaagacctccttttccagccttatttgcagccaggggtggccacatgatcaaatgctggccagtttgtccttagcagctgccagaaactgagactgtaaatgtttatttcaagctgctaaatttggggatagtttgttatatagcattagataactaagacacatctcatgcatatcccatcttcacaatgttttccatatctgtgatattacttatttcatatttttcttaaaactaaccaattttaactattaaacaaagatacttaaaagagaaactttacatcacaattgaaaatggaaaatcagtatcaattccataaacaaaagctaaccataaaaacatcagatgccattacctactgagggttatgagcctgaggcctgctctctttcttttcttttctttctttttttttgagacacggtctcattctgttgcccaggctaaagtgcagaggcacgatcatggctcactgtagccctgaactgctaggcccaagtgatcctcccacctcagcctcccgagtacctgggaccacaggcatgtgccaccacacctggctaatttaaaatttctttttgtagagacagaggtctcactatgttgtccagactggtcttgaactcctgggctgaagtgatctcccacgttggcctcccaaagtgctgcgattataggcatgaggcaccacaccccacccctgctctctctttgttgaaaagatagactagtgagtgctagagaattagggacaaaattcctacaggagagagggtaaacataggcacatccacacaaaagaatacgatgcagctataaaacagaatgtagaggtactctgtgaactgacatgctattgtcaggcacacattatgtgaaaaaaagcaaggttctaaatagactatctcagcttttagtcattgtggtagcccccaaaagctatccatgtcctaattcctggaaactgtgactattactttatttatttatttatttatttaatttatttttttgagatggagtctcgctctgtcacccaggctggagtgcagcggcgcaatctcggctcactgcaagctccgcctgccaggttcacaccattctcctgcctcagcctcccgagtagctgggactacaggcgcccgccaccacgtccggctaatttttttgtatatttatttatttatttatttagagacagggttttgctctgtcacccaggttggagtgctgtggtgtgatctcggctccctgcagcatcaaactccccaagctcaggcaatcctcccacgtcagcctcccaagtagctgggactacaggcatgtgccacatgcccagctaatttttatatttcttgtagagatggggttttgccttgttgcccaggctggtctcaaactcctgggctcaagcaatcctcccacctcggcctcccaatgtgctgaaattacaggcgtgaaccactgtgccaggcctgaatattaccttatatgacaaaagatgtgattaagttaaggatcttgagatggggagattatcctgggtcatccgggttggccctaaatgccactacaagtatccttttaataagagggaggagaatatattaccacagaaaagaagagagggcaatgcaaccatggaggcagagactggagagatgtggccacaagccaagcactgcctgcagccaccaggaaccggaacaggcaaagaagagattctcccccagaacctccagaggagtacagccctgccgacaccttggttttggcccaggaaagccgatttggactcctggcctctagaactgttagaaaataatttgtcttgttttaagccaccaagtttgttagagcagcatgggaaactaatagtgtaataaagggagaaataagaatgtctttcacatttgctggtatttatataaagaaactatggtaatgtggtttggctctgtgtccccacccaaatctcatcttgaactgtaatccccatgtgtcaagggagggacatgatgggaggtgactggatcatgggggatgtttcccccatgctgttcccatgatagtgagtgagttctcatgagatctgatggtttaaaagtggcagttcccctcttgctctctctctctcctgcccccatgtaagatgtttgctttcccttcgccttgcaccatgattgtaagtttcctgaggcctccccagccattcagaattgtaagtccattaaacctctttcctttatgaattactcagtctcaggtagttgtttatagtagtgtgagaacagactaagacacataggaaggacacacaagaaactaaagaggctaccagtggggaggaggtggatgggatgaacggagatggggagagccaagacttctcagacaaaggaagatggaggtggagggggcaggtagctggtgaaagagcacagaaaggctgactcagagaacagcagtggcacccagagagcagaaccccagggcacacagccagggagtctggctgctgcagtcagcctccctctaagatcccaatgttctcagcagccccattcttccgggacacaaacacaagatctattgcaacagcattccccattcttattgccaccatctcccaggcagaatctgccaatggactactcgtatctactctctgccttttccttactaacagaactccaactttctttgaggccacaatgtgtcctgctaaaagactatgtttcccaggatcctttgcagctggctggggcgtgtgactaccttctggccaaggaatgctttagtgttgtgtgggatctctgggatggtgccttaaatggaagggacgatcaacaggattcagcagctcaaagagcaaaggaaaaaagtcaatatcctaagaaaggtctccttaattggtcttactctctcttgttcctctggatagcagcatttgtaatgggcaatgttgctttctaaaaaactaccttaagcagacaacaagtgttcccctttgtatgcagtcaaatgctctaccactgagctatacccccatgttcccctttgtataaactattttagtcttgctggtcatcttgtccagagcatggggtggcatatactgctagaagtcctttttttctttcttactaatgtaactcaaaatttcttcaggctgattaaatgcccagtttttaaagaccacaattcccagcctcttttccagttggggtgaccaatgatgaaaaggtgccattgaacggggtttctgggaaggccttataaagggagatgattcagtttagacctgaacgctttttgctcttcctcccttcccttttcctcctataaggaatggtggcagtggtggctggggcactggcagccaccttggatggaagccacaggccaaggatggaagccacaggctaaggatgacagagcagaaagaggccgggcatggtggctcacacctgtaatcccagcactttggtggccaaggtgggaggatcatttaaggccaggtgtttgagactagcctggccaacatggcaaaaccctgtctctactaaaaatacaaaaattagctgggtatggtgacatgcgcctgtaattctataattccagctacttgggtggctgaggcatgagaatccctagaacccaggaggtggaagttgcagtgagctgagactgtgccactgcattccagcttgggtgacagaatgagactttcaaaaaaaaaaaaaaagaaagaaaaatagtgataggacccctcatttctcatgactgtggagctactatcccagtgctggtttgccaacctctgtactttctgtatatgagggaaaataaaccctgtaatagaatgtctgctgtctctctccacatgaggattacacatgcccactccattgacttgaggcttgctatatacttgctccagccaaaagaatgccagtgaaagtgacacaggccacttctaaatatgaaattgaccaagagccactgggtgattcactccactttcttttttcctcctcctgcaagaccagcaatactccaaatagggatagtttattcagcctgagaccccaattaagatactgtagagtaggaccacaaatgacctgcaaaggacatagtgtgagcaagaaatacacctttgggccacgtgtggtgattcatgcctgtaatcccagcactttgggaggctaaagcaggaggactgattgagcccaggagttccagcctgggcaacatagtgggacttcatttctttttttttttttttagacgaagtttcacccttgttgcctaggctggagtgcagtggcgcgatcttggctgactgcaacctccgcctcccaggttcaagcgattctcccatctcagcctcctgagtagctgggattacaggcgtgtgccaccacgcctggcaatttttgtatttttagtagaaatggggcttcaccatgttggccaggctggtctcaaactcctgacctcaggtgatccacttgcctcaaccttccaaagtgctgggattacaggtgtgagccaccgcgcccagcccaatgggacttcatttctacaaaaattagaaaaatttgcctgacaaggtggtgtctgcctatagtcgcagctactcaggaggttgaggcgggaggactgcttgagcccaggagtttgaggctgcagtgaaccatgatggtgctgcactctagcccaggtgataaagaccccttctttaaaaaaaaaaaaaaacaaaaaaacaaaaaacacctttgttgtagtaagccactgagatttgagaagtttgtttgtgcagcataacttaaccacactgattcctatagaccccataatttgtttaagcaactcttattgcaggactttgttactaccaagcagatacaattctaagtgataggtcccccataagagatgaccccattgccactgtccctgaaagggcctaagacagagctaatgaaagctagccaggcatggtggcacatgcctgtagtcccagctactcaggaggctgagatggagctggtccgagtgttgtgggttattgttaagctgatttaacattgtctccccacacaaccatgcttgactagcataaaaataaaaaagaaaaatgaaaaaaacaaaaaaaaaggaggctgagatgggaggactgcttgagcctgggaggctgaagctgcattgagccatgatcgcaccacagtactccagcctgggtgacaaagcaagatcatgtttcaaaaaaaaaaaagagagagtgaactaatgagtgttcccattggctgccaagcaggatttcaagttatttcctggcagccacttccctcaatgtgtctcatcttatctctcacctggcatccatgccctctcctaagcctcttttggaaactgcttctcatctaactcttaactaagtggcttctgcaagactgactcaggggtaggccctgaggtggaaatgggctagtcactagcgggtgccaatgaagacatgaagtgatttttatacagtcatctggctgctatatacagtcgtcatcattttcctccttattatacatacaaagcacttagaacagtgcctggcataaggtaaatactaagtaactattgttgttgttatgagagaggtaagagtggaaacgggccaggcacggttgctcacgcctgtaatcccagtactttgggaggccaaggtgggtggatcacctgtggtcaggagttcaagacccacctggccaacatggtgaaactccatctctactaaaaatacaaagaattggctgggtgtggtggtgtgcacctgtggtcccagctactcaggaggctgaggtaggagaatcacttgaacctgggaggcagaggttgcagtgagccgagatcataccactgcactccagcctgggcggcagagcaagaccctgtctcaaaaaaaaaaaaaaaaaaaagatgatggcagcctggactacatgatgacagtggatgtgatgagaagtagtctgggaatgtgttttccttatttcttatttatttattttgagacaaggtctcacacggttgcccaggctagagtacagtggcacaatcacagctcactgcagcctcggctcctgggatccagtgattctctcacctcactgtctcatgtagctggaactacaggtgtgtaccaccacgtccagctaattttttacattttgtagagatggggttttgccacgttgcccaggctggtctcaaattgctgggctcaagcgatcctcctgcctcgacttcccaaagtgctgggattacaggtgtgagccaccacgcccagcctatctttccttatttgttaatgatttatttaggaatttctcatttgtgtttataactgtcttgtcaaggtgttagagattttgttgtggttgttgcaggatggagaaatgtcttgagggtagagccaaagggtgggttaatggactagcggtgaatgaaaaggaaggatcatgggtaactcccaggtcacgtactcagttcctcaatgtttgatccctcacctatccatgagctctgtcatggcagaaacaagatctgtcaggattctttgtgtccagcaggggcttacttgcttctccaagaaatactcaaaaagttgctgaattaatcaatgttgccagagtcatacacaggcttaaagtccctttggccctacaccagggtccctcaaaggatccgtgacacatggactgctggctttcctggagagcccatctgaaaggcattcaccaaatccacccaacgaatctttactaagaacctactatgtgccaggcaatattctagaggttggagacacaaacaggaggaaagaagaaagacaaagaaagacaaaacctctggcttgattgaactgatattctagtgggggagataatgaatgaatacatcgaaaacgcaatatgcagacagtgatgtgttaaagagaaaaataaagcaggagacagagagaatcgtgtgtgtgtttgggtgtcagttacagttttccatagggtggtagtcataaaggcaagaactttgaaatcagagggaatcacacaggcaaagtccccagggcagcaacatgcctgccacactacaggaacatgaagtaggccagtgtcactggtgtgaagggcaggaggaaagagatgaggtcacactggtatcagggaaccagctctgtaggactttgcaggcctgctttctacctgttccagcctcactttattttttatagtgaggtgggagtcacggaagggatctgggcagaggagggcgctgatctgactcaggtgttcacaggctccctctggctgcaagcagggaacagactgggggtgacggtgggagcagggagaccaatgaagaggctgctaaaatagtccagtctggaggtgataattgccaggagcaggatgcaggaagaggagagggttagaagtgatcaaattctggacagtttgtaaagggagagccaactggatttgctgagggactggatgaggaatgtgtcctagcccacttaggctaagaccaccagggacaaacctgtagtccagcactgtcagatttatttacaatggcaatgggagagtctgcacactagagataccataggccaggggtccccaactcccaggctacagacgggtaccagtctatggcctgttaggaatagggccacacagcaggaggtgagtggcaggcaggtgagcgagtgagagaagcttcatctgtatttacagccactccccactgctcgcattaccacctgagttccgcctcctgtcagagcagcagcagcattagattctcacaagagtgtgaatcctattctgaactgtgcatgtgagagatctaggttgccctccattttttttttgtttgtttgttttttgggttttttggttttttttttagatgaagtctcactctgtcgccaggctggagtgcagtggcgcaatctcggctcactgcaacctctgcctcctgggttcaagtgatcctcctgcctcagcctcccaagtagctgggattacaggcatgtgccaccacacctagctaatttttgtatttttagtagagacaaggtttcgccatgttggccaggatggtctcgatctcctgacctcgtgatctgcccgccttggcctcccaaagtgctgggattacaggcatgagccactgtgcctggccagttgcccgctttttatgagaatctaatgcctgatgatctgaagcgtttcatcccaaaaccattcccccaaccctatcccatccgtggaaaaactgtcttccacaaaaccagtccctggtgccataagggttggggaccactgccataggccctatgggcctttgttttgtgagggagtctcaacaaacagagttattttttaggtgaaatgtaaactaagcagtgttcagattgcctcaaagcaaatcagaactgtgtgtaaagggatcaatatcaggtccggatggtgaagtgggcccagggtttgtcttctcagatgcaataaagtttacatagatgtagaatattgtgtccttatctgaagctccaaacctggattgtaaatagggactgcttttctgtgtcaaagtgacttagctcctccaagcaaaagtgagatgtttcattcttacttgatgtgatttcaaacagcaaagtttgtgatcatctctgactttagacaaccaaagtttcctactaagaaagcagtagacactcaaaggatgggaattctgccactttacatctgcagtatgtccaagagaaatattttttcctggctgggtgcagtggctcacgcctgtaatccaagcactttgggaggccgaggcaggaggactgcttgtgcccaggagtttgagactagactggacaacatagggtgatcccatctctctctttaaaaacaaaatttttttttttgagacggagtctcactcttgttgcccacgctggattgcagtggcctcatcttggctcactgcaacctctgccttctggattcatgcgattctcctgcctcagcccacggagtagctggaattacacgcatgagccaccacgcccatctaatttttgtatttttagtagacacggggtttcaccatg[137 bp omitted]atccaggcatggtggcgcgtgcctctggtcccagctacttggtagggtgaggtgggaggatcacttgagcccgggaggtcgaggttgcagtgagctgtgatcgttccactgcattccagcctgggcgacaaagcgatcttgtctcaaaaaaaaaaaaaaaaaaaagcaaagaaatgttttttcctagtaattcttccaccaactggcttatgtcagccagataaataaggagacagatcttttacagtcgaagctaattctgactttcccaagtatgacgaaagaggtaaggatgacattttttaaacctaagcaacaagaagaatgaagcacgctactaagataagacagactggaaggttttggggagacacgatcgcaagctcagtttcggatgctctgagtttcagatggctcaaatgcgtggggagggcaagtgggcatctgcaggctctctaacagcctgcaccgacttcacttcttacatccctttcactcttcggctcgcttcgctcgctatctgtagtcaatcgtctactcctgtttcccacgcctgcacctttgtatgtgcaatggacactgccaggaaggccatctcctcatggtttaaccccacttcctaacaccctcaagcaagaccagaagccccgcacagcagcactaatgctcgggccccacccctctcagggtcccgcctccctcaagccccgccccgcgctgcgctcacttgtagaagctcacagggcggttgtctgcacccaggcggcccgcagtgttggagcagttcggcgccctgcagtacttgggcatggctatccagcccccgctgagttttgccgggtcagcggctgcactttggttctcgcggagcgccgcctaaccccgccccacccgcgctcgccgcctgcctcacgtgacgtccgtggagtctcgtcacgtaccggggagagagctgagagcgcctgcctactaggcgcccctccacagtgccacagtcccgccctcgtcacgtgacgaatgggccatagcgagtactgtgcacctgcgcaaagccggcccttcgtcaccccgactttcatcacgtgttggggggaagggcggcgtcacggcgtttctgagcctgcgccaaccaaatcaactggctagtcaatctcttacggctccaccctacgcctacatccgggcaaccgttggggcgcacatagttcctctaggtggcggcaaaaaccgaggtgaggcggccgtggccttagcctcgtaaaaattaaaacctgtatgtttcagcgaataatgaaaacgcagtctggatgaaagaccccatgacgcttaatcaggcatccagtacactggctgtggccccgccccgccaggcactcgctccgcctcttcgcccccattggttctaagcgccgcccggcatccctgcgattggctaggccgggcccgtcgcgtccaataggcggtggcgccggctttcccgcggctgttcgctgttccagtgggtcgtggcggtggcggcagcggcggttaggggatgtaacggtcgcccgcctccggcgtgacgatggcggccgtagggtccggaggctatgcgcggaacgatgcaggggagaagctgccctctgtcatggcgggagttccggcgcggaggggccagtcctccccgccccccgccccaccaatctgcctacggcggcggacgcgactctcgacggcctccgaggagacggtgcagaaccgggtgagaagctgctcgccatgtctaccccagttccaggcttcctaggtttcccctagtcccgtcctgagaactgtggccccgacatcagcccccggccagtcccctcaggttgttccctgccatgcctcgtcccctaacccccgcccctttagccacggcccctcccactttctcctcgctgctttcccggctccaccctcagcgttggagcaattcgggggttcctcgctggttcccacccgtggaaatgcattttgcttctgtaaatcacagcctagtcctgctatattttaacccccgttctatcgcctttagacgtcacgatcatagctcactgcagcctcactgccctggcccccgctgagtcattaaggtcccttcgagggttcggtccagagtgttacctgccccaactcttcctcgcttctaccccgccttctctcaccttctgcgatctctatcctttttcctcaccaaggtgggattcttaatccatattgtcactcaaaactatgagaaagacgtgagaagttatttataaaatctctgcagtgctgcctggggaggagggcgtacagaacagttccctaaatcctgagacagaaaaatggaaagaaatgatttcacagtaggtagaaggaattccattagcacagcggcaattaaaaaaattgttttccagctgtgtaggcacaaaatctgtttttataaaatggagatgataagaaccatactactggtagggcgcggtagctcacgtctgtaatcccagcactttgggaggccaaggtgggctgttcacctgagatcagttcaagaccagcctggccaacatggtgaaacccgtctctacaaaaagtagaaaaattagcccggcatgctagcgcgcgcctgtaatcccagctactcaggaggctgaggcgggagaaatcgcttgaacctgggaggcggaggttgcagtgagctgaggtcatgccactgcactccagcctgggcgacagagtgagactctgtctcaaaataaataaataaataaattatactattgcattggagggaaatgaaattttaattgtgatcttcttggcacggagtccagataaagggaggatacctggtagctgctggtggagcttgttcctgccccatgactttctcctgcactgtgattataccgcccactcctggctacagggctctggctgtacctcccatgtgctctctgtcaccaaggttcagtcacactggcctgcttttggttttcctgaggctccatattcttttctgcctcctggcctttgtgattggtgagtcctcagcctgggctttttgctgcaatctgcctgtctggctccttcccatccttcaagtctcagcctgaatgtcgctatcttgaaaggccttctcgaaccccattctaaagcaaacagccaccttcatctgtcacccagcaccctatacttcatagcctttatcttatatgttcctgaaagtgccctttgagctattaaactacatataacaatagcaaattcagagaggcgttatagcaaagtggctaagagcacagactgctgctgatggtatggttggacccaggcagcctgagcttaaactttagtcctgttcttcctggcaggttatgaacttcgctttttcttttctttttttttttttttgagatggggtcttactctgtcatccaggctgtagtgcactgggttgatctcggctcactgcagtctcagcctccctgggctcaggtgatcttcctgcctcaagcctcctgagtagctgggactgcaggcgcatgccaccatacctgactaatttttttgtgttttctggtagagacagggtctcgccgtgttggccaggctggtcttgaattactgagctcaagcgatctgcctgcctcggcctcccaaagtgctaggattacaggcgtgagctactgtgccccgccaagttatgaacttatctgtgcctcagttttcttatctgtaaaatgagaataatgatgtagaaatctctcatagggtatttgtgaggattcaatgaggttacatatcctaggcacttagaacaacactggcatatggcaagtactctattcatgttagctaatactgatattatgactgtgtatttggggtaatatttatttattttttttgtttggcagcacagagttgatctgtcttgcaaagacctagtctaaaagtgaccattcataccagggcccagtaatgctgatcgacagataagacaacatgagtgccatggcttggttgtttgtgttggaatcctggcactaccccttcctggatgggtaacccctcttggcctctgtttcctcaactgttttgttcctttttttttttgagacagagtctcactctgtcgcccaggatggagtgcaatggtgccatctcagctcactgcaacctccgcctcctgggttcaagcgattttactgcctcagcctcctgagtgcctgggattataggcatgggccaccacacctgactaatttttttgtatttttagtagagacagggtttcgccatcttggccaggatggtctcaaactcttgactgagccaccacacccagccttgtttaaattttaaatattactgttcatgtggttttttactcgttgaaaccgctcaaatttctggactgtgaatctgatgtggggaaactgtctacctttggtcactactgtgtctctcctgtacagcccaaagtgctagctttggagccagactgcctgggtttgtatatcaacattgccacttgcagatgtaggatcttgggcctcagacttcttacctgtaaaacaggggtgataatagagccttcttcgtggcttgttgggaggattcaagtcttttatacatataaaagtactaagaggccgggcacagtggctcatgcctgtaatcctagcactttgggaggccgaggcgggtgtatcacctgaggtcaggagttcgaggccagcctggccaacatggtgaaaccccatctctactaaaaatacaaaaattagccggacatggtggcatgtgcctgtaatcctagctactcaggaggctgaggcaggagaattgcttgaacctggaaggcggaggttgcaatgagccaagatctcaccactgactccagcctgggtgacagagcaagactccatctcaaaaacaaacaaaaaaaagtacttagaaacttattcacaggtcaccttctcaccgcggcattcgcccccttcccctgtgctcctaacctccttatctgctttcttctctcttgcacccatcattacttggcatctatttcacatatttgttctgctccttttctatgttctacatacccatcaccagtagaatgtgagccccccgagggcagggatttgtctcttcctcaccactctgtgcttttcacctagcgttgtatttgtcaaaggaatgttgagagaacaagtgttagctgctggtggatggcgtggccacagaagctcagtgtgggtgttgaatgtagcaggacctgaatgggtggccaaggcggctgcaccatgtggtgctggctagggtgggtgcctctgacttgggctttttctttgcaggtgtcactcgagaaggtgcttggcatcacagcccagaacagcagtggcctaacctgtgaccccggcacaggccatgtggcctacctggcagggtaagcagataagggcctcgacgtctaatcattgctagggaatttggagcttggaacctgaagccatccgtaaatcgctctgagcctcatatttttcacctgtagaatgtggagaatggggcctgcctctgagagctgtggagaggattccatagccccctctctgtctagaacagttcctggcatgtagtgagtgcaatgaaagcctttattatgactacaggggggaggtgacagcgattctgggaaagacaggtgattaaagtccacgctgtggtgtcaggtaacctggatttgtgtcccagctctgccatgtatgctgctctctgagcctcttcctctgcctctgtaaaacagagctggtgaccccctctgcttgcatagttgagaagactgaagaagatgctacagctgttcattccataaatactcatgtagcctggcactgtgctaaggacgtcccctctctgggtttgtttccttatctataaatgggcctaaatagtcgtgacctgacctggcagttgtgaggatttaaaacaattacatccctctttctctctttttgttttgttttgcttttttgagacagagtctggctgtgttgcccaggctagaatgcaatagtgtgaataacagctcactacagccccaacctcctgtgctcaagcgatcctcccatcttcacctcccatgtagctgggactacaggcacatgccaccacagccagctaattttttttagtggagatgagatctcactctgtcgcccaggctggtctaaaactcctgagctcaagtgatccctcctgccccatactcccaaagtgctgggattatagccagcttaaggtcttaattagcctagggcctgacagacattacctcagaggaagtgttggtttctatttaagaacatagcaatgttaaagtgccctagaattctcagcgtaaacacctggaggagggggaggaggaggagaccagagagaaccgagggagcttgtttatttgtgggcttttctggtgggaatagaatcatcccaggaccccaacactccccacagttgaggcacattttcctctttcttcccagctgtgtggtggtgattttggaccccaaggagaacaagcagcagcacatctttaacaccgccaggtaggctgaggcctgggcccggggcaggggtggaaccaggggcttggcacgcctcccctcccctacacagcctggagatactcatgggtaggtgctcactcattcacttacatgttggctcagcagcattcgcctgtgctgggtgctgttccgtgtgctggggacacagcagtgaccagaggagacgagaatctctgctggctagagcgagacagactgtaaactagtcagcaaattacgggctgatcatgatcagtgctatggaggaaatgatggaggatgtcttcgggcaggtttgtgggcagagaataggaggaaagccttatcagaaggctcagggaacgctgccttgactctgagacctgaaggaagcgagagggtgacccataagaagctgtagggagagcgcttcaggcagggggcacaggaagggcaaaggccctgcagtggttaagaatctccggcgctttagaagcagccagggatctgggtgcctggagaaaggagcagggaagatgaggctggaccaggcagaagccacatcccgtaggccttgcagccttgtagagggtctgcatagcatgctgagtgcagagagcagccacaggagggcaccacaggccaggaatgtgcttttcacccccagccctccagcagctctattccctgctttgcttttctccacaaaatttgctcccatctctgatatgctgtccagtttcctcattgatggtattcactgtgggtctccctcagtgtgagcactcttgagagcagggactttctctgagttcatttctgtgtccctagcaccaaagagcagtatctggcatattgatggctattttctaagagaaagacttaacatgatttgggttttagaaagatcccttcagctataagtttactggggaaggacccgctcctctgccttggggctaactgatcactgctaccctggggatgtggtcccaatagggctgtgacctttggaaggcacaccatgtccctccttggcatagctcaggctcagctcctttggcccagttctccaggtggatggataaggagtgggttttctcctgcccttatggtccctaaggtacggtccttaagctacggcaggttcttgttatctgacagaagtgcattccctcttgaaagtggctttttggaccttttgctcctaactgtgggttctgttactggtgataagggcagagctgggttccattcctggctcaagcgtctattcactgtggaatctcaggtgagacacttctttcagagccttggtctcctctgaaaataaaatagctgcctccaactgggagagcattcataaggcagcagctacaaaccagagtcacacacacttgcccaatatagtatgttttaaaggttggataagtggacaacatttcaagttttttaacacaaaaatccaaatgtcccttttgtttggagaagtgagaaattctctggcctctggggcccaaattcccctgtggcagtgaggggctgagcttagtgaaatttgtcaggcccgttgtggccagttcctcacacctgtgttgcctccctaatccctgtaggcagtggagtgggtggcctggatctatagtagatggtatgcaggtgtccgcccttggccaccagtgggtgtgcattaggaggtggtgtggccagtgtggggattttcactccaactgcatatcagaatcacctggtccctgtgcctcaccgcccccccaccgccacgcaagagaaagccaaatcagttgatctgggatgaaacttgggcattggcaattttgagactttttatattgaaataatttcagacttagaatagtacaaagagctcctatatacctatgtacctttcacatatttcacaaatgttagcttttttttcttttttttttttggacacagagtcttgctctgtcacccaggctgctggagtgcagtggcacagtctcagctcactgcaacttccacctcccgggttcaggtgattctcatgcctcagccccccaggtggctgggaccacaggcatgtgccaccatgcccagctagttttttgtgttttagtggagacggggttcatcatgttgcccaaggtggtcttgaactcctgagcttagacagtctgcctgcctcagcctcccaaagtgctaggattacaggtgcgagccactgcacttggccaaatgttagcattttaccacatttgctttatcattttttgtctatatacatattaatttgttctgaactatttgagaatcagttgtagacatgatgcccctatatctctaaatacttcacgccaggcatggtgattcacgcctgtaatctcagcactgtgggaggccttggaggcaggaagatcatttgaggtcaggagtttgagaccagcctggggaacatggcaaaaccctgtctctactaaaaatacaaaaattagccaggcctggtggcaggcgcctgtaatcccagctactcgggaggctgaggcaggagaatcgcttgaacccgggaggcagaggttgcagtgagccaagatcatgccactgcactccagcctgggtgacagagcaagagtccgtctcaaaaaaaaaaaaaaaaaaaaaaaaaacttaatcaaataaatacttcagtgtgtatttcctacaaaaaaaaatgacaatctttttaaactgtaatacatccagcaaaatcaggaaatgaaaattgatatatcactctcatccactccccagagggcaccattcaggagtcagcctttgtcccatgaatgtcctttatggccaaaggattctgtctagaatcacacattgcattgagttgtcccctcagtctctttcaggctgacgtggctcctctgtcttttcttgactttcaggatcttgacatttttttttttctttttgagatggagtctctgtcgtcaggctggagtgcagtggtgggatcctggctcactgcaacctgactccccagttcaagtgattctcctgcctcagcctcccgagtagctaggattacaggcatatgccaccatgtccggctaatttttgtatttttagtagagctggggtttcccca[136 bp omitted]cactgtcgcccgggctggagtgcagtggggcgatcttggctcgctgcagcctccacctcctgggttcaagcgattctctgcctcagcctcctgagtagctgggactacaggcatgcgccaccgtgcctggctaatttttgtatttttttttagtagagacggggtttcactatgttggtcaggctggtcacgaactcctgacctcgtgatccacccgcctcggcctcccaaagtgctgggattacaggcttgagccactgcacccggccaatcttgacactgaggattgtagacgaggtattttgtagagtgtcccagcatttgggtttgtccaatgcctcctcacgggcagactcaggttctgcatctttggcaggaacagaccagaaggggtgctgtgttcttcctggtgcctcctctcaggaggtctcctatgactggtggtgttcactgggagcacttggccaaggtgttgcctgccagattcctccacttcaaagcctctcttttcacctttgtgattagcaggtatcctggggacatctttcctgagacagtgcaaatattatcttgttcctcaccaaactttcactcaactaatcttaggctttgacacttttcagatgctccccagggaaatctaatgtacagccaggactgagaactactggcttagaggtcagggctctgccctgtctggttaggtaactgcaggcaggggacttccttgtgttgcagtcacctcatctgccaagttggttcatgagagccctgactccatgaagcatgcttgaggaatcagtgcactgatggccagacagcatttgccagagggccaggcacaaggtcagggcatgcgacaggttagaggtggctacgggcaacagaaacccctccacagcatggcttaaaacccaagagcatgctcttcctgcatgtcataagtccagaggtgggcagcccaggggctgtgtctctgaacgccacattttttttttctgtctctctttttgagacagagtctcactctgttgcccaggctggagtgcagtggcgcgatcttggctcactgcaagctccgcctcctgggttcacaccattctcctgcctcagcctcccaagtagctgggactacaggcgcccaccaccacgcctggctaattttgtttttgtatttttagtatagacagggtttc[144 bp omitted]ggctggagtgcagcagcacgatcttggcttgctgcaacctctgcctcccgggttcaagcaattctcctgcctcagcctcccgagtagccgggattacaggctcctgccaccacacctggctattttttgtatttttagtagaggtggggttttgtcgtgtt[132 bp omitted]tgaggcttctggtcttgaagtcacttcatggcccaagatggagttctggctgtcgtgtgcgtatttcaggaggggaactggtaggaagcagggcaaagggttccctttgacgagtatttcaggaagtcccacacagcatgtcagtttacttctccttggccagactaagtcatgtagctgtacctgcatagttgcaagcataaaactggggttatgtcagtaaggaaagagaggcgagtggatatccaggaggcagcttgccctgtttgttgcagtaaggagccacgggaagcctgggaagcaggttgacttgatgatgaatattccatgaagttgccaaagtctcacttagcgacatttacttagttatctacacaccaatttaccatctcacgtagggagacaattattagattgttaaggaacaaaggtaaaaataagattaaaagagagaagggagtagaaggaaaccatacaatctgggaacagtgaatcttgctgccagaaacctacgagctagcctgttcattcagtgcttgtgcaggctagctaggagtatcagaaacattttggctctttatggattttccagaacaccttgagtatttagcagtggagcacaggctgcaggctaccttgatgtgatgcctgccaggatcctcccatcagcaccacccgtttagttaggccaggcctgtaccatttcctgcatctctatttctcagtgttacagggtggatagggtcttaggatacccactgcggcagagggagaagaaagcagggtccgcatacagtgtctactccatttgggtttggtgtctcagggcggaaggggcctttgcatttacccccatttctctgtgtgctttgctgggcacaccagcggcactggctctgtgggagctgcttgagctcacctctgctggcctcttccgaggcttgggaggcagaagagggcagagtcctatcagagtcgccaggatggggtctggctggccaccctcagcggaaccagtgatcagctcttttctttatccccaggaagtctctcagtgctctggccttctcccctgatgggaagtacatagtgacaggggaggtgagtcgtgatcgtgactgagtgggagtcgggggctggggggtcttggaagccattccttctgctcccggcaggcctgggagtccctggaatagctccttcctgggccagaacagccctgtagcagatgggggaggtggcttttgggcacatcctgtggcaatgccatcttcggccttgacaaccctctagccctgcccagtacagagcccagcagcagtaacgaccccaccttccctagaatgggcataggcctgctgtgcgcatctgggatgtggaggagaagaatcaggtggcggagatgctaggccacaagtatggtgtggcgtgtgtggccttctcacccaatatgaagcacatcgtgtccatgggctaccaacatgacatggtgctcaacgtctgggactggaaggtaagagccgaccagcaggcctgtggcaggcagccagctgccacagcatcctatgtcttgggcacagggagagctacatgagaggacgcagtaaagtgctcactcacccaacagataacagctattgagcacctgtgacatgctgatcccttattgtagggcacaaggcaggctcccagctagaagcattatacatatttttatattgaccagctgtgaccttaggcaagtgacttaacatctctgtgagtctgtttcctcctctgttagatggatatagtagtacttatcttgttgagttgtgagactttaatgagttgataagcactggaaggctgggctttggaacagctgtggagctggcagaagtgggtaccaagtcctggctctgcccataacccactatgtgaccttgagcacatgacatctccccctctgagcctggtagggttggggagaagcgcctccctcgtggggcttttgagggattgaggaaatttcatgggttatcctgtgaagggctcagggcagggcccagagcaggagccccatctgtgacagccataggttgtgttgtccttacatcccagccgtgactgtccccaataccatgtgtgggctgcagagcttagacccttggagagagctctggaacatactgtcccatggggaccattccaagcctctgtcccttcctctgtcggtgaggaatgagcagggtgccccacataggtttccccatacagcagctccctggagggtcccaggaagacagacttggagtggggacgagcagggagttccagcctgagggcaaaggcacaaacagtccagtggaatgagtgctggcatgagcttctctgcacttattcttccagaaagacatcgtagtggcctccaacaaggtatcttgtagagtcattgccctctccttctcagaggacagcagctattttgtcactgttgggaaccgccatgtgaggttctggttcttggaagtctccactgagacaaaggtgagtttctgtccctgcccctttagccaggccctgagggagtcaccatcggtggcagcatggtctcctgtttctccctgagatttgagggcagcggtctcgggccatttggcctctcaggggcccagctgctgcttctgggcctactctcagggtgctgatgcacaggccctgccaggaaccccctgaccctgggaccagctctcattcttggactgctgctgtccagcccctctgtccagagtggcagggttctagtgttttcttcccttctccatttggaagagcttcttagagttctcctgttttgttgtgtcctatcatctggtcatgcagggcccagctgtgtggacaagtatctcactacgccctctgtgtctccaggtgacgagcacagtgccccttgtagggcgctcgggcatcctgggcgagctgcacaacaacatcttctgtggtgtggcctgcggtcggggccggatggcgggcagtaccttctgtgtgtcctactcgggcctcctctgccagttcaatgagaagagggtgctggagaagtggatcaacctgaaggtaccacctccctctctgccatcagctggacagactctttctcgtgatatgtgtctgcaggggtgctcatcagcattgaccacacaggttctgcttatgtgactagtggtgaatgacgcccactctctgagcttaaggttccacatctgtaaaatgggagtactgctgccctccccgcagagctgataaggaagtcacgtgagataacataggcaaggcagtgagcacggtgcttggtaccctgaaatgggctcaaggtgacagttgttttcccatgactatttgatctacttcacatttcttttctcctttgagcactctggctggtagaggattgcatttttttttaattaatttatttttttttattgatcattcttgggtgtttctcccagagggggtttggcagggtcttaggacaatagtggagggaaggtcagcagacaaacaagtgaacaaaggtctctggttttcctaggcagaggaccctgcgggcttccgcagtgtttgtgtccctgggtacttgagattagggagtggtgatgactcttaacgagtctgctgccttcaagcatctgtttaacaaagcacatcttgcaccgcccttaatgcatttaaccctgaatggacacagcacatgtttcagagagcacagggttgggggtaaggtcatagatcaacagcatcccaaggcagaagaatttttcttagtacagaacaaaatgaagtctcccatgtctacttctttctacacagacacagcaacaatctgatttctctatcttttccccacctttcccccttttctattccacaaaaccgccatcgtcatcatggcccgttctcaatgagctgttgggtacacctcccagacggggtggtggccgggcagaggggctcctcacttcccagaaggggcggccgggcagaggcaccccccatctcccggacggggcggcggcagggcggaggcggacccccacctccctccctgacgggccggctggctgggcaggggctgacccccacctccctcctggacggggcggctggccgggcgggggctaaccccccacctccctcccggacggagcggctggccgggcgggggctgactccccccacctccctcccggactgggcggctggccgggcgggggctgacccccacctccctccgggacggggcggctgctgggcggagacgctcctcacttcccagacggggcagctgccgggcggaggggctcctcacttctcagacggggcggctgccgggcggaggggctcctcacttctcagatgggacggccaggcagagacgctcctcacctcccagacagggtcgcggccgggtagaggcgctcctcacatcccagacggggtggcggggcagaggcgctccccgcatctcagacgatgggcggccgggcagagacgctcctcactttctagacggaatggcagccgggaagaggcgctcctcacttcccagattgggcagccgagcagaggggctcctcacatcccagacgatgggcggccaggcagagacgctcctcacttcccagacggggtggcggccgggcagaggctgcaatctcggcactttgggaggccaaggcaggcggctgggaggtggaggttgtagctagccaagatcgcgccactgcactccagcctgggaaacattgagcactgagtaaacgagactccgtctgcaatcccggcacctcgggaggccgaggctggcggaccactcgcggttaggagctggagaccagcccggccaacacagcgaaaccctgtgtttggtggagaccaaaaaaatacgaaaaccagtcaggcgtggcggcgcgcgcctgcaatcgcaggcactcggcaggctgaggcaggagaatcaggcagggaggttgcagtgagccgagagggcagcagtacagtccagctttggctcggcatcagagggagaccgtggaaagagagggagagggagaccgtggggagagggagagggagaccgtggggagaaggagagggagaggaggattgcattttttaaaaattggaggtaccattgatttaataacttttcagtcaaaaaagactacacaaaatacataaacttttatttatttttatttatttttactttttttttttttttgagatggcgtctcacttgttgccaaggctggagtgcagtggcgcaatctcagctcactacaagttccacctcccaggttcaagcaattctcctgcctcagcctcccaagtagctgggattacaggtgcctgccaccacgcacagctaatttttgtatttttagtagagacagggttttaccatgttggcctggctggtctcgaactcctgacctttagtgatccatccgtcttggcctcccactgcgcccggccataaacttttaaactaaagcatgatctatcgatacattgcagagcttctttcctttagtatctgaaggtttgagtcaaagctgttttcccatctggaatcagttgcccatttggctatccgcccgagcgttgtggtttcctctcctgttcctggcctgcctttgtgactcactctggagatcaccttcgaggttaatggcttgtggaagagttccaagttttatctctgtcctagttggttaaacatcattttctctttttcaagcaagtgaaaagctttcaatagatagatgtttatttcctaagcactaaatgactcataaattaagtccctgtagatttggaaaaactccttaaactgtatctagaggtctagcacttcctagtaggatagacagtcctttctagatactgtaacttttttctgtaccgctttggagtacagtctttatgaagttgtttgtaagcaaaagggaataaaatttaagcctaaaggctgggcgcgatggctcacatctgtaatcccaatgctttgggaggccaaggcaggtggatcacctgaggtcaggagttcaagaccagcctgaccaacatggtgaaaccccatctcaaaatacaaaaaattatctgggtgtggtggcggccgcctataatcccagctactctggaggccgaggcaggagaatcacttgaacccaggaggtggaagttgcagtgagccgagattgtgccattgcactccagcctgggcgcaacaaaaaactctatctcaaaaaaaaaaaaaaatttaagcctaaaattcaaccctgttactacaagtgacttacctgaagttgcagtctgctgaacaggtattttccatacacagctacgtttctctgtagacagcagtgacaattctgtttccgttcatgcctctgcctacctgctggcacatgtctttcaatagcagcagtatgctatatcctgatttcacaaatcttaaaatatgctaaaatgggtgtcttagacccaaggaactgtaagtcttctctggaggcctaaggctgctctgtcagtccccatatccccgggccaggccacgtgaagcaccaaatccactggggtcccttttgcccctacaggtctccctgtcttcctgcctctgtgtcagccaggagctcatcttctgtggctgcacagatgggatagtccgcatcttccaggcccatagcctgcactacctcgccaacctgcccaagccacactaccttggggtagacgtggcacagggcctggagcccaggtactgccctgtggggagagggaatgggaggggcccacccagagtctgtccactggcattcatccatgcttccagatccatctatctgtctgtccatcccacaaatacccatcatgactctcagccctgggcattacaaagcagaaaagtccttgccttccgaggcaagcctcacagtgagaagtgaggctgggtagggggaagaaacagtgagaaaacaaaggaataatatcatttcagatagcggtcagcatggtgaagaacagtgcagagcaggtgtgaatgtggcggagtgtttccatccacatggctgacccctactaagtggctgctaagtgccagccctgggctggaagcaggacatgcctattataatgaagcagcaaaatctctgcctctctgcagtatagcaagggggctcgatgataagcaagtacacgaaaaagataatttcaataggcatgagtgctttggggaacacagcagggactcgggaaggagagtgactggggtgggctgtgctgattgggtgcctggtgagaaggagctgctgtgtggagagctgggtcccagcagttgaggtgacagcacactgggcttgttacgttgcaggaatagtaagggactgtgtggccagagcccagtgtgtccggggaggatggtgggagatgaggccagtgtggggcgcctgtagtctatcctcaggtcagtgggcagttgctggggtttcgggcgttggggtaaatgaccaggccttacatgttaggtccctcagctgctgtgtcgagagtggatagaagcactaggctgtggctttcttctcctttgttgcaagtctgttttatggaattgggggctacctaaccagggggtgccaggtgcctagggctgcctctttgtggatttctggatgctagctcctgggtgccttttccacgacagggcctgaacaggggaactgggtgtcatgaaggaaaggagggggcgagcaacccacaggcagtgttgtgttgtagtagtcgggctcacagctctgctgtcttctgttgtgctctgtgaccttgggaaggtgactatacctccctgtgcttccgttttctcatgtgtaaaatacagtacctagctcttattgtggttgtgagaatttattgcaggtaaaactctcggcctggcacagtgtaaatgctcagtaaactgtagccttcatagggagaccccaggccaagggacagctccccagcctccttaggacacagaggctttttgatcatgcgttggtgaggccaagaagaggtgggacctgagatacatgcctattatctttctatgctcagagagagagcaggagcttgggttgggtgaaatgatgggcgataaatgttcataggaatcaaaaactcaattgctctcggggccaggcaaaaatttccggtttgtagcctctatatgaaaagcaaagcagaggaagagggaagagggaaaagtagaattggagcaggagagatggatggccacaaataccatgagggatggcattgccggggaggcatctccactgtcactagaggtggctgtcactactcagtgacattgatggtgattgattacccatgtggccttgttagcttcctcttccacaggaaggcggaagcagtctacccagatacagtggcactgaccttcgaccccatccaccagtggctgtcctgcgtgtataaggaccacagcatctacatctgggatgtcaaggacatcaacagagtgggcaaggtgtggtcagagctcttccacagctcctacgtttggaacgtggaggtgagccccccccccacccccttgcccctgcttggcctctgcacagttccccacagtttgggaacccattcagtaattccttcagaagatactcattgactccctcctatgcatcaggccctgtcctaggtgctgaggacacagacacaaaatccctgcccttaacaagctcacatttggatgggaaaggaaacctggaaacatcatcagtgaataacacgccaagcagcagtaaccctctgaagaaaaatgaggcggggaaggggaaggggaatgcaggtggtattctagagaggagaggggtcagggaaggcctccctgaggacatatgagcagagacctgcaggaaatcggggagtgagacctgcaactgctggggagaaccacaagcacagaggccctgcggcaggaacatgcactccacagagagctttgctgtggaggtcgtttatgtatttcactgctttttttaaaaaggagttgaagacggggcatggtggctcacacctgtaatcccaacactttgggaatctgaggcgggaggatcacttgagtccaggagtttgagaccagcctgggcaacacaagaccctgtctctacaaataatttttaaaaattagccaggcatggtagcacacacgtgtggtcccagctactcaagaggtggaggcaggaagatcacttgagcctgggatgtcaaggctgcagtgagctgtgattgtgccaccacactcccacactccagcctgggtaacagtgagaccatgtctaggaaaaaaaaaaaagttttgaagtttttattttctgagaatgaatttgtgggtttttaaaaattctctaaagttaaccaggcacagtggctcatgcctgtagtcccagcactttgggaaatcgaagtgggcagattgcttgagtccaggggttcgagatcagcctgggcaacatgaggaaaccccggctttacaaaaaatacataaaaattagccaggcgcgcctatagttgcagctactcggcaggggctgcggcaggggggctgaaaatttcttactgggaatgtttgtcctagagaaattgggttttcagtggccagattcaggatcgtgagaaagaactttgtccttttgaataggcagcattcagcctatgactctggttgaatctgtctgccttcatggggctgacgtttttgttgacagcactttttttccactcaaagaatgttttttaataacttttaaaattcctgtatgaaatttttaaaaatttgggataataggtgaaatattacagataaggctacagtccacattgatgacttccctgcccccagttctgctctctctcgccctcaccattatcaattttattatgggtgtcttcagttgattttctttgcatctccttattgtttatgtatatagctgttcaacaacagtatctgtggatagatcttttcatcagttctagaaaattctcagccaatactgcttctaccctcttctctctctttttttttttcagacggagtttcactcttgttgcccaggctggagtgcaatggtgtgatctcggttcactgcatcctccgcctcccgggttcaagtgattctcctgcctcggcctctcaggtagctgggattccaggcatgcgccaccacgccttgctaattttgtatttttagtagagacggggtttctccttgttggtcaggctggtcttgaactcccgacctcaggtgatccgcctgccttggcctcccaaagtgctgggattacaggcatgagccaccatgcccggcctattcgctctcttctaaggttctatctaactctaaggttctatctgtattcttcatgtttctgaaaataaaaatcacacaaaagatatgtagagtttatcaattattgttagcagctttttttcccccccaagacggaatctggctgtgttgcccagtctggagtgcaatggcacaatctaagctcactgcaacctccagctcctgcgttcaaacaattctcctgcctcagcctcccgagtagctgggattacaggcagccgccaccacgcctggctaatttttgtgtttttagtagagatggggtttaaccatg[136 bp omitted]tttattgagggttgcaatatggtgatattctaaatctataatttatttttattagttggactacttacgtgaagagatatttgctctcatctgccatttggtcacccagtgctatacttcatataggaaaggcaggagaaatacttgattctttccctttatttaccagttttcaagataatgaattggttccctatcctctaaaggtaactagttttatttaatatcattataaactcatatatatttaaatatatcagatatgttttaatctattgtaattattaactttattggagctcatatcatcccatctttggccagtgagagcctcttaacattggctcctgagccctttggacatgaccctagtatttcttgatagccaccttgctgcctgggatgccaatatgttccagtctcatcttgtacatttcctgtcacacatcaggaatcaaccatttctcgaaaagaccatgtttttttttttgggctgggtgcagtggctcatgcctgtaatcccagcactttggaaggctggggcaggggaattacccgagcccacgagtttgagaccaacctggccaacatggtgaaaccttgtctccactaaaatacaaaaaattagccgggcatggtggcaggcgcctgtagtcctagctacttgggaggctgaggcatgagaattgcttgaacccgggaggcagaggttgcagtaagccaagatcaagccactgcactccaatctgggtgacagagggagatcctatctcaaaaaaaaaaaaaagaaaaaagagaaagagaaggccagggtttttttttagtacaaattgggacttcagaatcacaggttgggtgttagggatgctcatcgctattgggtcgttcttccagaagcctagttcttaaggacacaggggatggtggaattagaatatccccagtaactcatttgctttttcccacattatacatgcaacagtctgagaatggacaacttttcaattctgaagatagttaaaacaattgtaatgcatatgttctctctgttctctccaatttttaaaatagttatactatatttacaggatctgaatatgtagccattatatactatagtgtctcccttttgacccctgtttattttggaatggggaattatatatgtgtgtatatatgtatgtgtgtgtgtgtatatatatatataaaatgataaaatatacatgacatcaagttcaccatttcaactattttaaattgtaccatttggtggcatttagtacacttacagtgtcatgcagccatcattactctctagtttcagaacattttcatcacccacccaccccaaaaaatcctgtatctgttaagcagtcctccccattccccactccccccatccatggaaatgactaatctgcttctgtctttatggatttgcctgttctgaatcttttcttttctctccttctttccttccttccttccttcctttttttttttttttttttgagatggagtctcactctgtcgcccaggctggagtgatgcagtggcacgatctcggctcactgcaagctccgcctcccgggttcacgccattcttcttcctcagcgtcctgagcagctgagactacaggcacacgccaccacacccagctaattttttgtatttttagtagagacgaggtttcaccatgttagccaggatggtctcgatctcctgacctcgtgatccgcccacctcagcctcccaaagtggtgggattacaggcatgagccaccatgccaggctgtttcctttcttttcctctttctttcttttttttttggatggagtctcgctttgtcacccagactggaatacagaggcacaatctcggctcactgcaacctccacctcccgagttaagctattcccatgcttcagtctctagagtagctgggattacaggcacatgccaccatgcctgatgaattttttgtattttagtagagacagggtttcaccatgttgcccaggctggtttcaaactcctgagctcaggtgatctgcccgcctcagcctcccaaagtgctaggattacaggcgtgagccaccatgcctgacctgaatattccttataagtgaaatcatagactatgtgggcttttgtgcctggctttcacttagcataatgttttcaagatttatccatgttgtagcatgtgtcagcacttcatgcctttttatggtggaataatatttcattgtacggatagaacacattttgttctctgttatcagttgacggccacttgggtttttttctaccttatggctgttgcgaataccactgctatgaacatgtaagtacaagtttttttgtttttttttttttgaaacggagtctcactctgtcgcccaggctggggtgcagtggtatgatctccgctcactgcaacctcaggctcccaggttcaagcgattcttctgcctcagactcctgagtagctgggattacaggcacgcaccaccatgcctggctaatttttgtttttttagtggagacacggtttcgccgtgttggccaggttggtctcaaactcctcgcctcaagtgatttgcccacctcggcctcccaaagtgcagggattacaggcgtgagccactgtgcctgacgtagttctttctttcagttacatcactttgtttctgagtttttgtaggttgtttttcataccttggatcattttttaaatatcttttaccttcttttgaaacagtaggcccagcgtggtggctcacgtcggtaatcccaacactttgggaggccgaggcaggtggatcacctgaggtcaggagtttgagaccagcctggccaacatggcaaaaccctgtctctgctaaaaatacaaaaaattagctggccgtggtggcgggcgcctgtaatcccagctacttggggggctgaggcaggagaattgcttgaacccgggaggcagaggttgcagtgagccaagatcgtgccattgcactccagcctgggcgacagggcgagactctgtcaaaaaaaaaaaaaaaaacaaagtaagttatagtttttatctttttttgtgaaaatatgtttctgctgtgcttttttttttttttcttttttaagagtaactattggatttgaccttggtcctttcctgttgttcatttttatgtgataccagtttttctgaaattttagaagttggtgtgcttcaggacagattttccaactacacaagaagaactctgtcttttcttttttttgtgggggtggggtggcatgttttgttttgtttttgaaaaggagtctcactgttacctaggctggagtgcagtggcatgatcacagctcactgaagcctcaacctcataggcacaagcagttctcctgcctcagcctcccgagtagctgggaccacaggcatgcactaccatgcccagctaattttttatttttggtagagatgggatctcattatactgcccaggcttgtttcaaacttgggctcaagcagtcctcctgcctcagcctcccaaagtgctgggattgcaggcttctgttatttttatactgtgttaaaatatggcagcctgctttctgatacttcctttttgtggtcctctttatctgttatgtctcttctttcgtctcaatctcctctttactttatttcttctgtccctgttgtgattggtcaatttcatttctactcttagcagtttctcttcagtgtggagctttgtcctggaaggacaaagttcacaggatcttctccagtccctttaggccttaccccttgcactcaactgctgttggggtggatgaaaccctcctactttcagctgctgttcagtttggcccagtgtgctttccaatgaacacctcttggctactttggaattatcctgttgctgggtctgtcagatgccttattacttctctgtctcccacatgcatgctgatgatatgtaggtcttgtgattggtggtggtttgtcccactcacttgtattttggggtttatgggagtattttgtcactgagttttgctataaatgttgtctgtaggtttgggttttgctatctggttgatgtttttcttatgtcgagattttgggagattaaaaaaattaatgccgctactatcatcttcccagttctcaatcttccgtattttgaaatctctttatatggtggctctttgtccttctcagcttcattctaaatatctttagttttgtctttcagttcacttaattttctcctcagttatatctaatctttggtttttaatgtttttatttttttattattttttttttgagacggagtctccctctgccgcccaggctggagtgcagtggcgtgatctcggctcactgcaagctccgcctcccaggttcacgccattctcctgcctcagcctcctgagtagctgggactacaggtgcctgccaccacgcccggctaattttttgtattttttttttttagtagagacggggtttcaccgtgttagtcaagatggtctcgatctcctgacctcgtgatcctcccgcctcggcctcccgaagtgctgggattacaggcgggagccaccatgcccggcctattttttatttttttatttttatttttttgagatggagtttcgctcttgttacccagactggagtgcaatggcgcgatcttggctcactgcaacctccgcctcccaggttcaagcaattctgctgcctcagcctcccaggttcaagcaattctgctgcctcagcctcccgagtagctgggattacaggtgtgcaccaccacgcccagctaattgtgtatttttagtagagacggggtttctccatgttgaggctggtctcaaactcctgacctcaggtgatccgcccacctcagcctcccaaagtgctgagattacaggcatgagccaccgcgcccggccaatatgtttttattattcatttctagaagctgttctgttttggtctttttcagccctgcttggttaatctttataatttctggttggctgcacacttttaatcttgtcaaaattatcttttagttcttcaaacatattgaatgtagttattttatattctgtctgataattccaatttgggtttttttattttgtttttggtttgtctgtctgtttgttttgagacacagtctcatatgttggccagagtagacttgaactgctggtctctagcagtcctcctgcctcagcctcccaagtagctgggactacaggcatgcgccacctcccctgatttaataattccagtatttaaagtcttgctagactctgttgcttctgctgcttcttgctgatggtacctcgttttcttttgtgcttagtcatgtttgattgagttccacatttcccttggaagtttatttgagggtatgtgttaaggcctaggctgaaggtgggacatggatgatatatggtagcattttgtgtcctttttttttcttgtttatttttagcatagaaggtattgcacgatacctgtttatctttaacttactttttttttttccatgaaaatgcaacagtaagtcatagtgctgtcattgagtcatcctttgccttgtcctctgggaactgtaggtgtatcctgagtttgaagaccagagagcttgtttgccatcaggatcctttctgacttgttcttcagacaacaccattcgcttctggaacttggacagcagccctgattctcactggcagaaaaacatcttcagcaatgtgagtggcttcctttgtgaaccatctttcaggaggaacaaagacctactgtaagcttgaatgcaggggcaggagagagtctgatggaccctagatgttaggttccatgagggcaagagccggcaaccaaggcaggtccctctctgcatcactgcctcttgtttctctttctcctgccccctctctgaggtggcacgctctatcctctctgattctttgccagttggctcctgctctgcagatgtgtggacgtggccactcccggcagcccaacacacccagcccaggtgaaattgcttcctaagtcttgagatggaattccctgggagagcacctgatgagccagcccattcagctgccacacagtgaggcctcacgggggtatgggcagaatgctggcgagagccatgatgggaggctgggaagaaaagtttgctgaggaaattttggttagtattgcaagcccagtgagagggcgtctctggggagctgagacctgagtcatgcattcatttattctgcagacacttattaacgtccatgccaggtgcttggctacatgctagggacacaacagtgactaagactcttctgtcctgtggcacacacaatctagtgagggccgacagtgaactgacagccgaccatgttaatgcacaatcacaagtgcgaaaagcactgtgaaggaaaatgtgcagggtgctagtaggacatagagcagcagcatgtgaacttatctgggacatccggagcagcttcccgcggaagggacagctaagttgagattgggaagagtaaagagggaaggggagagggtctatacttagggaatagcctgtatgaaggccctggggtgggaaacagctgggtgaattggaaaacctgaaagaggccagtgtgattggaactaaaaagaccctccatgcaggaggctgtagcaggtgccctgcaggtgcacctttattactcccctcattccctacccagtgctaccatcgtctcctctgtacctgtgacatacatgctgtttttggctgcacacaatagaaaaactcaaaacaagaggtaaaagttaggtttctgactcatgaaagtagtctgaaggtaaccagtttagaccgttctgcaggaagcccttagggatccaagggccttccagctctctactctgtcatttgagggagcaggctatgtcctcatgacccagtgtggctatgggggctcctgctatcatatctgagttccaggctgcaggatggagaaaagacagcagaagaatacgtgcttgctttatatttaatagttcagaatttattcacatattcttatctagctgcaggggaggcaaggaaataattattctgattggtgaaactcccagctcaaaattagagttgtattactaacgaagaagagactggctatggagggacacgatttcagaggtgcttctgagctgctcgtgctgacctcagccctgtccttcctgcagaccctgctgaaggtcgtgtacgtggagaatgacatccagcacctgcaggacatgtcacacttcccagaccgggggagcgagaatgggacacccatggacgtgaaagccggggtgcgggtcatgcaggtcagtcctgacggccagcatttggcttcaggcgaccgaagtggaaatctgaggcaagtgggccctggcagtgtccagtgtacacctcccagctccagctcaggttctcagggcagtgggcagaagccctggccttggcacctcctgctgcccattgggaatgaggggctgtgaatagtaatcccatgaacagctcccattgggaacttaagctcgtaagaggcttccagaagggctgagagcagagtaactaccaggacctcagcagctagggtgtgcagattttgcctatagagtgtacaggcaagctcacatgactctagggcagcgtgacactttcaccagccacatggtaccagtgctgaactgtcaccgaagatgccagctggaggagggtcctggtggctctgggagaggggctatgagggtgggatagctgagagttcaggctgcttatgtgccctgttgaggtttggcaggatgttaccaacccagtaggtgctagtgggacataggccctgttgctgggaccaggtttaagatgacaaatgacagctgtgaccacctgggtattggagccactggggaatggaggagagttgggggaaactagaggggacataaaggggcagcagccaccaggcagccccaggagagtaggctacaagttttcaaactttcctgttgtcaagaagagcagaaagtgccgatttttttctgtgaaattcgataatttttaaatattggcacctgttttgatatcagtcactgtatgagaccagctcagtgtgtcagtgagctgcttacattgacatggcactgtctggagtggcaaaacggtaccaagagccaacatggggatagtgctcttcccccttggtgggcgctggcctgagcactgtgttgactgatttaatcctctcactgacccctgatgtaagtgatgttattggcacaaggtgtctggagtaagatcacacgggtagaatgaagaagctgggatgactcgatgactgatttcatttggggagaatcaggaaggtctagatttgagactcttttaacaatgagagactggaatcaaatgttctcatccatagctcctatcctggactatgacctctggcccctagcccctggcccctgtcctaccccagggaccacctctgatgcagccctacgtaaacacctgcccccctagaagactgtcctagatccctggggctctgttctggcccaggcaccacaaggggctgctgcctgctgaggtgctccctggttcaacacggctccctttacgatggcaggtttctaaatgagaaaagtggttgtgcatgtctagagtatttggccatgataaggggttctcattgttggtggcctggccattctgacctattctagaagtggtagagcacatggggctggggtgtggggcttcagcgggcggtgtgtgtctcccaggatccacgagctgcacttcatggacgagctggtcaaggtggaggcccatgatgctgaggtgctgtgcctggagtactccaagccagagacgggtgagcccgcagcaggggtggaatgggggtcaggcagggaggcagcccccctggcagggccacagaaaggggtagttggtgtctggtgggactgtggatgacagctgggagttttgtgttcggtaagggcccctgtagctggaccctgagaccagagtggctgggacttcagaaagcaagacacccgcaggcaggactcagcttgacttgcccgctgctggtgccagcacccaagccaaaggggtggatgtatgaatgagtgaattgtgaatgagaagatagattgattgttaggcattattttcaaaaagtttgaagcctatagaaatattgggagaatattataatgaacaccccataggcttcacccaaattcctcaattttttttttgagatggagtcttgctgtcacccaggctagaggggagtggcaccatctctgctgactgcagcctccacctctctggttcaagtgattctcgtgcctcagtctcccatgtagctgggattacaggtgcctgctgccatgcctggccaatttttgtatttttagtagagatggggtttcaccatgttggccaggttggtctcaaactcctgacctcaggtgatccgcccgccttggcctcccaaagcgctgggattagggcatgagccaccacacctgacctttttttttttttttttttttttgagacaagagtctcactctgtcgccctggccggagggcaatgacgcgatctcagttcactgcaacttccgcctcccaggttgaagcgattcccctgcgttcaagcgattctcctgcctcagcctctcgagagtagctgggattacaggcacgcccccaccacacccggctaatttttgtatttttagtacagacggggtttcaccatgttagcctaggctgaaggctaggaccatagtagggtctccagacctcatggtcctcttcattaaaacaacagaaaattccttctgggccatcagatgagatcatgagataggagaagatttccaagtgaagatttcgtttgtttcaagacagagtcttgctctgtcacccagatgatatatggatgatatatggtagcattttgtgtcctttttcttgtttatttttagcatagaaggtattgcacgatgctggtctcaaactcctgacgtcaggtgatccacccgccttggcctcccaaaatgctgggattacaagcgtgaaccaccatgcccggctcctcaagatgttttctaggctgggcacggtggctcatgcctgtaatcccagcactttgggagttacagagttggtggagttatatcctgatgtgattttccccatgttcttctttcgttctctcatcccccatgctgtgtgccccaccaacttgtcttgaaacatatcttcactcggttcgcctctcctgatctcccctctgcctcaggtcatgttattaggcctcagacatagcaagtgaccagagtagggaaggctggtggcagatgggagtctggccacaggcagtcaataggacctgaacaaggcccaggtagccagacctcagagggtgagaggacactggttttggaagaggctgagaggttgccagggctttacccagcacagacccagcaggcaagagcgctgggctctgctggggcgtctgctgtggatgtccctggaggagcgtccatgcgcccatcgagactcatcctccctgagctggtggtgaggaggtgaaatgccagggtgtgggggctctgggaaagaccacacagagctaagggagtggcccttgccaggcttgggccaagttggctacagttgaagaaccaaagaccccttctccgaggactgggcagcttggtcacactgcccttctgggaggccagggcacccacgcagccttcaggaaccagtctcattctctcctctcacagggctgaccttgctggcctcagccagtcgggaccggctgatccatgtgctgaacgtggagaagaactacaacctggagcagacgctggatgaccactcctcctccatcaccgccatcaagttcgctggtgagcccctttcttcccgctccctgcgccttgctagctaccctgctaaaaaaggattcattctttcaactctcctgtaaaatatatatccaaacaagtgaatacagtatctgtgtacagtatacagaataatgactggggccgggtgtaatggctcacacctgtaatcccaacactttgggaggccaaggagggtggatcacctgaggtcaggagttcgggaccttcctagacaacatggtgaaaccccgtctctactaaaaatacaaaaatttgctgggcggggtgttgtttctgtaatcccagctactcaggaggccgaggtgggagaattgcttgaacctgggaggtggaggctgcactccagcctaggcaacagagtgagaccctgtctcaaaaaaaaaagaataatggccaggtaccatggctcacacctgtaatctcagcactttgggaggccaaggcaggtagatcatgaggtcaggagttcgagaccagtctggccaacatagtgaaaccccatctctactaaaaatacaaaaaaattagccaggcatggtggtgtgcacctgtaatcccagctactcgggaggctgaggcaggagaattgtgtgaacccgggaggcggaggttgcagtgagccaagattgcgccagtgactccactccagcttgggtgacaatgcgagactttgtctcaaaaaaaaaaaaaagaagaatataggccgggcgtggtggctcatgcttgtcatcccagcactttgggaggctgaggcaggcagatcacctgaagctaggagtttaagaccagcctggccaacatagtgaaaccccgtctctactaaaaattcaaaaaaagtaaccgggcatggtggtgcacacctgtaatcccagctacttgggaggctgaggcaggagaatagcttgaatccaggaggccaaggttgcagtgagccaaaattgtttcactgcactccagtctgggtaacaagagcaaaactccatctcaaaaaaaataaaaataaaaaataagctgggcgtggtggccgaagtgagtatccacagttcttaggagcaaggtttgaactaggacgttgttgatagcagagactgttctaattgctcatggtcgtaatattgttaaatacggtacttggattcaccacgtgcaggttaagaagcagaacattaccagaggcttgcaggccttctctgggtccctcccaggttacccttcctcccttatatggggctcactcccttctgtgagccaatgactcctccttgagcaacatctaatacttgtatgtcaggcctggaccctctcaaatgtcctgtcatgaaggagcatgtgtgatgtgcccagactcagagttttatatttgttctgtcatttcatcctcaccaaactgttattctgtaaagaaatgagacggccgggggcatctcacgccattgcactccagcctgggcaacaagagcgaaactctgtctcaaaaaaaaagaaatgagaataataaaagcaagaatgtttctaatgcttaccatgtggcagtccctgttccaagggcttcacatcactctccagagaaggaactgtcaccatgcccattgtacggaccggaagttgaggctcaaaggggaggcccaggttcagagcagtgtttaacagctttgaccttggcaccagagaatgcctgggttcagtcctgcccctgtcctctctgtgtgccttgggacaaggactctgtgaacctctgtgttcatgcttgtccagtgggatgggtggtgagcattcaggaagacccgctacatgcatggggcctggcccaaggctcatgtggatcttgcagttgatcctgatggcacgagcctcccagcctgtctccactggtcgctgctgcagtcctgcctctactccgctactcaagtcacctatctcaatcccagactggagagggtgtcccttctttgtccccagcctttgtttctctatatgcccttgctctgcagagcctgccttggccacagctccacctgtgccccctcacacgtacagctcataccttacagagtcccacccagacccagcacccacctcaccacctttaggaagccttgatcccagcacagttgattgatggctcttgcagtggagttccccagctagggtcccctgcccatgtggcccagccctgcctaacacacagcgtcctcctcccctaggcaacagagacatccagatgatcagctgtggggctgacaagagcatctactttcgcagtgcccagcaggtagggtggcatggcctccttgggggctggggtggggggttgtcggggcattctctgaaggtcctgccggccctgccagggttcggatggactacactttgtccgtacccaccacgtagcagagaaaaccaccttgtatgacatggacattgacatcacccagaagtacgtggccgtggcctgccaggaccgcaatgtgaggtaaggggtggccctggacccttagctggcctggtctgccttgtcctaggctgtctgctttcctccctctgttcctctggtccccaagaagctgggaaggaattgagggacccagcaggtgttccttcttggtttttttttgtttttgtttttgaggcagagtcttgctctgttgcccatgctagagtgcagtggcaccattttagctcactgcaacctccacctcctgggttcaagtgattctcctgcctcagcctcccaagtagctggaattacaggcgcctgccaccatgcctagctaattttttgtatttttagtagagacgaggtttcgcc[142 bp omitted]gcctccaggtcagcagagggctttcttctggctctccctagagccggtgtgggatgactaaggtgctgatgtggcacataaactccctcattcacccgtattccctgagcacctaactgggctggatggtgctgggatcatggcagtggccaggatagccccaggccctccttcatggagctcacagtccagtagaatggacacggccacctcacagccacagacagtgacagagtggtcagagatgggggagcccaggggccctgtggagacacctgaccccacctgcggatcaagcaggacttcctggaggaagagacaccttagcctggggaggatgtggaggagcgagccagggggaggcagagagtgagtgtgcagagggcaaagcagtgcaaagaggctctgcaccccttcccagttctttctcatgcggtgccaagcactgagcttgcagtgtgtgggggagatgaacattaactcagtggataccccaggacaacctcagcttgagatggggtttcagtttcagtctaggcatcagatggggacaagaggtagcagggggcttccaggggaggggaggacagcaagagccagagaatgaggtggtggggtaggcggggccctgttggccgcaacatgcccctacttccccagagtctacaacactgtgaacgggaagcagaagaagtgctacaagggctcccagggtgacgaagggtccttgctgaaggtgaggagttggagacccctgtctgtctgctgccctgatgggccacctattgtgacggcccacacctgagacctgtgcccttggtccttcctcagtgcaccgcgctgcccagcaccttctcaggcctggttaaacaaggatgcttgcgagagggtggggagggtgaccccagctgtgtttcctttatttacagagcccttccccaagtggggcgtctaagtgggttccattttgagtggcagcagggtatggtgggaagaatcagaggcatgaactcccctcctggtttgcccacaccagccacgggtcactcaggacaaggggggaccttctcagagcctctggtctaggacagttatgggttcaggttctgcctcaggctgactgtgtgaccttgggcaagcatcatctcttgaaatgcacacagacagcttgtctcatagacttgttctctggaggagttcagtttgcacatgttcagtgcttagcacagggcctggctactgttgttactgctgcggtggttgttaatttcttcacgtgtcgaatgggagcgggagctcctgccctgccagagtcccatgtgctgtgcatgcagcacgggggagggaggggcccaggcctcatcataaggaagaagcaggcagctggagtgacatgtgggtccctttcctggcaggtccatgtggacccctcaggcaccttcctggccaccagctgctctgacaaaagcatctcagtgattgacttttactcgggcgagtgcattgccaagatgtttggccattcaggtgggtgtgcctctctgcttgggatgcctccccacccgcccacaccctctgactccgaaggcaagtgcagcctctctgctttgtttgcagaaattattaccagcatgaagttcacctatgactgtcatcacttgatcacagtatctggagacaggtgggacatggacctttgggagagttgtggctcagataccatgagcactgcactcagcctgcctgtgtagagagcatttctaaactgcccagtttggattgtgggagtcttggtgtcacacccagccctgagttcaaataccagctctaagctgggcatgatggctcacgcctgtaaccccagcactttgggacgctgaggcgggtggatcacttgagctcaggagttcgagaccagcctgggcaacatagcaaaaccctatctctacaaaaaattagccgggtgtggtcatgtacacctctagtcccagctactcaggagggggaagatggcttgaacctggtaggtagaggttgcagggagcacagatcatgccagtgcattccagccttggtgacagagcaagaccccgtctcaaaaaaaaaacaaaacactaaaaaaacatatcccagctctgccatttattttcttgtcaccttgagcaggttatttcccctgagcctcagtttgctcccctgtaaaagacaccaccgtttacatttaccttaaaaatggtgtgatgaggccgggcgcagtggctcacgcctgtgatcccagcactttgggaggcctaggtggatggatcatctgaggtcaggagttcaagaccagcctggtcaacatggagaaactgtgtctctactaaaaatacaaaaattagctgtgcgtggtggcaggcgcctgtagtcccagctacttgggaggctgaggcatgagaatgacctgaacctgggaggtagaagttgcagtgagctgagatcgcgtcactgcaccctagcctgggtgacagagcaagactctctcaaaaaaaaaaaaaaaagaaaattgtatggtgagaaatgaatgagatgatatacatacattctttagcacatgggtggtactcaaggaagtcccttttgtcactccctttgatttaccccagttcttccccacagcccccttcctcaggtcttgaggcctccagaacaggccctggtttgctgggatgccccagacctgggcccagggtgtggatgtggcaagtccagcacccctgcactaagcggataggggtgtgttttccaggagcatctggagaatggggtccaggctgtggtgtgggtggcttcagggtcagccacggcagcggctcccatgcttactcttcctctgccttgtgtgtctctctttgacctccgcagctgcgtgttcatctggcacctgggcccggagatcaccaactgcatgaagcagcacttgctggagattgaccaccggcagcagcagcagcacacaaatgacaagaagcggagtggccaccccaggtcctggcagcccctgcctgtccaccagagggatgagtccctgccagggccccatggagtgatgctggggacacagtggtggccaagacagccctaggccctgcccttagcacactcacagctgagtaggggagacagactttgaatatgcagttacagtaatagatacaaaaaggttttgtggatttttttaattttcgtaaataatagagacagagtcttgctgtgttgcccaggcttgtcttgaactcctgggcccaagtgatcctcccaccttggcctcacaaagtgctgggatcacaggtgtgagccactgcacccggctatgagaagggtattaaagtggaaaagcaaagtgtttggcgagcctctcagcactgtgatgggggatgccccaagcggctgtgggaacagagcagtccctgaccggccagccaaggggaggggtgggtagacaggggatctgaggggagggctgcagtggggccacgtgtcctcttactcccacgtgaaagctgtagcttcacttacttctttgaatcttctaaatatatttctttcaagtctttatgtagcaaagccaattttatttgcagagaactcatgttctggtttttgatttgaggttttggtttgggtattgctcattttgagtgggaggttttttggttttcttctcttctgctgctgggtgtgtctgtttttgccattggctccatgtggctcccagggcaatgtggagaccaggccttgacatgggccactggtcctgaggtcctgaggtggtgttagagatatcttgcttttgaggctcccactccacccccaagctatgaaccagggccctggcttcagtgcctgcctcatgccaagggtgttttagtttcccgtactcgggaagagccaccatcattgctaccacctacaggaagcccagcacaggactgcagccccgctgtctgcttggctttctgtcccattgctgtggccctgagagtttgcattcgtttgtagcctggcctttgttaatctcatctattgtggtgatgtgtttctagtggggagacggcatcaagtgagagacttgccagcaccatcttgaccagcagccaagaatatgttcacatggagcttagcacagggcccagccctaggcaagtccccaccaccagcccatttgcctgtattctctccttaccatcctcattcctggctttaggcaggatacgtatgtgtccacacctagtgagattcactccctgagccctggagagcaaacagaggatgatctggaggaagagtgtgagccagaagagatgctgaagacaccatccaaagatagcttggatccaggttggaaaaggggccctattttgaactatgtcagtgtagggaatcattgctgggttttgcccatgaccttgtttacagggcctggcacatattaaaactcaggagtcgacagggtgcggtggctgatacctgtaatcccagcactttgggaggccgaggtgggtggatcacctgaggtcaggagttggagaccagcctgaccaatatggtgaaaccccgtctcaactaaaaatacaaaaattagccgggcgtggtggcgtgcaactatagtcctagctactagggaggctgagacaggaaaattgcttgaacctgggaggcagaggttgcagtgagctgagatcgcgccactgcactccagcctgggcaacagagcaagactccgtctcaaaaataataataataataataatataaataaaataaataaaattcagtaatcaggcttagcgtggtggctcacacctggaattttagcactttgggaggctgaaatgggagggtcacttgaggccaggaggtcgagaccagcctgggcaacatagcgagagcccatctatgcaaaaaaaaaattttttaaagaaattagccaggcatagtggcacacatctgtagtcccaactacatgggaggctgaggcaggaggatcacttgaggccaggagtttgagaccagcctggcacgtaccaagaccccgttcctacaaaaagaaaaaaattagccaggcctggtggtgcacacctatagtcccagctacctgaaaggctgaggcaggaagatcgcttgagcccaggaattccatgttataatgagctatgattgcaccactgcactccagcctgaataatagagtgagatcctgtctgtagaaaaagaaagaaactcaataatcatatcagtcaagactctttcagtataaaagcaaccaggcttaagtcaggaagaggattttttggtgcctgaaaattggagaggattagctttcagcatggctagatccagatagacagatgatgttaaaaggaagatttttttttgtatcttttggctctgcttttcttcatgttggctttgctgatggacagactgtccctttactaggggaaaagatacccccagcaactacaggcttataaaactccatagagaatagaacacctctttcctatagtagctcaagcagagtcttagggttgtgtggctcatgtttctggtatctgctgtacccacttctgagccagttgttgtagctgtccacatctcagcatgtgatcacttctgagggcagagactgtagtcagctccatccactcacaccacctgaccaggcatcaaagatgtgtttgaggccgggtgtggtagctcacgcctgtaatcccagcactcagggaggccgaggcgggtggatcacctgaggtcaggagttcgagaccagcctggccaacatggtgaaaccccatgtctgctaaaaatacaaaaattagctgggcgtgatggcgtgcgcctgtaatagcagctacttgggaagctgagacaggagaattgcttgaacctgggagacggaggttgcagtgagctgagactgcgccactgcactccagcctgggtgacaaagcaagactccgtctcaaaaaataaatgaacaagtaaaaataaattgaattatgttgcggatattgtccggaatctttttcctctgcaaagtctctcatctacctgtatgttggtgaatacaaagcagacgcctgcgaaattttaagttattcccctccaggtggccatttaggtttttcctgattgcacatcactgttaatgaggctatggagtggagaccactcctaagcctcctcgaaatgtgaggacttctccaggagagagtctgaggagtagcaccactggatcctggagttattttattttactttaaaaaagttgttttattattttatttcactatttttgttgcccaggctggagttcaatagcacaatcatagctcactgtagccttgacctcctgggctcaagcaattttccctccttagcctgtggagtagctgggaccacaggctcaagctcccacacccagctaaatatgtgtgtatcaggggatggtgtgtgtagagacaaggtctcactgtgttgcccaggctggtctcaaacccctggcctgaagtatcctcccacctcgacctctcaaagtggtgggattacaggcttgagccagtatgcctggcctttattttaaaagagaaccccggctgggcgcagtggctcacacctgtaatcccagcactttgggaggccgaggcgagcggatcacgagttcaggagatcgagaccatcctggctaacatggtgaaaccccgtctctactaaaaatacaaaaaaaaaaaattagccgggcatggtggcgggcacctgtagtcccagctacttgggaggctgaggcaggagaatggcatgaacccgggaggtggaggttgcagtgagccgagatcgcgccactgcactccagcctgggcaacagagcgagactccgtctcaaaaaaagaaaaaaaaagagaaccccaagagttctccaaacccagttactgccccaccctgcattgcattaggctctccattgtccccacacttttcctgccatcctttggtagtattaagctttttcacctcggtcagtctcgtgagtcaaatatcgcatcccacggtttaagtttgcatttccctaacccccggtgctgttgagccttctgacttctgggttgtggtgttgcctctttggggactgcccggttatgtatgtggcctgtttgttgggttgtttgtcctcttttcatggattctgtgtctttccagatcctcgttgcctgctaaccaacggcaagctgccactgtgggcaaagcggctggtaagtcttcagggagagggttgctcaggggctggcagaggaaacgcctccccagctctgccttctggaagccctttttcctttccatgtccctcttttccctggagaagccctgtcatccttccaggctcagtgagacagccctttgttcatgatcagtgctctctgccaggcattgttctggatgtcagggacacaacagtgagcaagggaaacaaaagtctctcccttcacaggctcacttgcctgtgtgggcgaggaacaatatccccattaaataagtaaatgacgtagtaggttgggtgctgataagtgctgtggagggaaaagaatcaagaaggaaaatacgtcagccaggtgcagtgatacgtgtctgtggtcccagctactcaggaggctgaagtgggaggatcacttgagcccaggaggttgaggctgtagggaactgagaaggcaccactactacactccagcgtgggcaacagagtgagatcctgtctcaaaaaagagaaaaagaacaggggcccagcacggtggttcatgcctgtgatcccagcactttgggaggccaaggcaggttgatcacttgagcccaggagttcaagaccagcctgagcaatatagtgagaccccatctctacaaaaaataaaaaaattagccaggcatggtggtgcatacctgtagtcccaggtactcaggaggctgaagtgggaggattgtttgggccagggaggtcgaggatgcagggagctgcactccacagcactccagcatgagcaacagagccaacactttgtctcataaaaaaaataaaaataaaaaagaaaataaggagtgttggggggtgtcagttttaagtaaacaggaaaggcctcattgggaaaatgatgtttgagcagagttgaagcaagtgagacaggcagatactgggacgaatgttctagtcataacagcctatacgtgtaaaagccacgaggccaggagctcgagaccagcttaggcaacataatgagactcccatctctacaaaagattaaaaatagccaggcatggtggtgcacacccatagtcccagctactcaggagcctgaggcaggaggatcacttcagcccaggagttggaggctgcagtgatcgtgctactgcactccagcttggatgg[139 bp omitted]tggtaaaaccccgtctctactaaaaatacaaaaattagctgggcatggtggtgcatgcctatagtcccaactactggtaaggctgaggcaggagaatcacttgaacccaggaggcagaggttacagtgaaccgaaatcatgccactgcactccagcctggcgacagagtgagactccctctcaaaaaaaaaaaaaaagaaagacaatgtggattataagagacagaataagagaggtgaatgaaggatgatcccaaggttggggcatgagtaactggaaaaaacaactgaaacagggaatctttaggaggagcaggtttgtgcagaggaaatgagttgagttgtcagcatgttaactttgaaatacctaccagacatccatacagaaatgtagagcagtcacatgtgcaattctgaagtttcagagaaaagttcatgaatcccagctgggcattcccagcactttgggaggccgaaacaggattccttgagcccaagggtttgagaccagcctgagcaacatagtgagagtccacctctaccaaaaaccaacaaaatgggctgggcgcagtggctcatgcctgtaatcccagtactttgggaagccgaggcgggcggatcacttgaggtcagcagtttgagaccagcctggccaacatggcaaaaccccatctctactaaaaatacaaaaattagccaggtgtggtggtgggcacctgtaatcccagctactctggaggctgagacaggagaattgcttgaaactgagaggtggaggttgcagtgagccaaggtcacgccactgcactccagcctgggagacagagcaagacttcgtctcaaaaaaaaaaaaaaaaaaaaaaacagagaaaggttcacgctggagatatgtacctggaagttgtttctgaatggtattgaaagccaagagtccagatgggctgtgtgaaatgtccgtgtcgctccctgcagtgagtgagcactcagccagttgcctgactgtccgatatccttcaagctaggggacgatgatgtggcagatggcttggccttccacgccaagcgcagctaccagccccacggccgctgggcagagcgggccggccaagagcccctcaagaccatcctggatgcccaggacctggattgctactttacccccatgaagcccgagagtctggagaactccattctggattcactggagccacagagcctggccagcctgctgagtgaggtacacacttccaccgcagcctggcccatagccccggcaccgtgacggccccagggcctggcgccttaggctgactcccactccatgggggcagggaggattacatgagatggtgaagggcaggagggtgagccccaggtctgttgcacagcaagacttcccaaggcagacagggagtctttggaaagtgggtcacttgggggttaagagcttggatgctagagcaggcttgtacccaagtgggggacatttgggtagatcgagccctgaccctacccattcctgttgtgtgacctggagtaagaggcttacctctttgggcttcagtcttctaaaaagtagtcataatggggtcaggggcagtggctaacacctgtaatcccagcatttggggaggccaaggcaggaggattacttaacgatcacttgaggagttcaaggccagcctaggcaacgtagcaagatcccacctctacaaaaatattttttaaatttttttgtttgttttgtttttaaatggtaataacaatctcttctgccccagagggcttttacaggaatccatgcttaagtatagggcctgggctcttagaggtgcccgtgcaactttagctctttctctactattttccaaacaaaattcatttttatcctatcctataatttgtcatcttcattgtggtataatatacatccagtaacatgcacagattttaggtatacagcttgatgaactatctgtgtaattcacgtgtgtccactaccctgggcaaaatctggagtgttttctacctcatagaaacccccttctgcccttcccagtcaggtccccgcaccaggataaccagtgttctgacctctcaccaaggactgggtttcctattcttgaacttgatataaatagacacgtagagggttgggcctcctatttttggtgccacacctcttcctcatctgtaaagggactgataatgcaggggcagaccaggacaagctggttgcgagtggagggcatggcacaggccctggttcacagcctccagcagtggggctgctggcatggttcctggcgcactgttggtggccccagccatgcctgcctcagaatggctgtgctgtcttccccatagtcagagagtccccaggaagctggccgcgggcacccctccttcctgccccagcagaaggaatcatctgaggccagtgagctcatcctctactctctggaggcagaagtgacagtcacagggacagacaggtgggtgtcctttccaccaagggagccttagttggaggaacccccagctgatagctgcatcctggaagaagtgctctctgccttcccagtgggcttgtgggagtggggacagttgaggcctggatggggcaggagcccagccttagttccctggttccaggtggggtacaggagggcctgacctgggggaaggagggggcatttggaggaggcggggaggctgtcgcagtgctcctgcaggagcagcgggtacaggtgcctaggggctccgggtggggctagctgttgagtctccagctgaagtccttgttccctctctgcccccactggcactgcagccagtattgcaggaaggaggtggaggccgggcctggagaccagcagggcgactcctacctcagggtgtcctccgacagcccaaaggaccagagcccgcctgagggtgagtgcagggcaggcagggaccctgtgacagtctgtgcgttcagccaagcccctttctgggcaccgatggtgactttgacccagtactgaagctcagagtctgtcgaggaagacacatgtggtccctgctgctgcctgaggattctgggcccagctgcctacagctgagagcccagctctgccacctccttgatgtggaacttcccttattcataaaatggggggcagctgctcttaccatccctcctccagatggggaaactgagcccagggaagggtagccctggccctggctcaccagaatggtcaggctgtgggctcctgaccccgactctgtccttcagactcgggggagtcagaggccgacctggagtgcagcttcgcagccatccactccccagctccgcctcctgaccctgcccctcggtttgccacgtcgctgccccatttcccaggtaagcaggggccagacacgcaggggactcgctgctcgggcctggcttagggccagtcacaatgtctaagcacaggccctgcacttggagcccactgagcctggaagacggggatccctgcttctcagcctgcgggcaacagggcagggatgggtggggcccgctttctccatttcaggtggcgtctgctgtgactcatggtgttggctcctcttgtccctcccctccttccctgtcaggatgcgcaggtcccacagaagatgagctgtccctgcccgagggacccagcgtccccagcagctccctaccccagactccggagcaggagaagttcctccgccaccactttgagacactgactgagtccccctgcagaggtagggccctgcctcacccacacctgccgaggccgtctgtgcagcctgggcacagcattggcgtccctggagttggctccccagcagggccaggagggtgagtggagagcaactgcttcgttttttttgagacggagtctcgctctgttgccaggctggagtgcggtggcccaatcttggctcactgcaacctccgactccctggttcaagcaattctcctgcctcagcctcctgagtagctgggattataggcatccacaaccacgccctgctaattttttgtatttttagtagagatgaggtttcaccat[138 bp omitted]cccactgcccctgctcgtaccctgtgtctgtacataagggtttctggggagtgccccgctgggctgtgggctggcctagggccagggctgctcggcgggaagggttatgagggtcccctcgggatcttcccctagagctcttccccgcagctctgggagacgtggaggcctctgaagctgaagaccacttcttcaacccacgcctgagtatctccacgcagttcctctcaagcctccagaaggcatccaggtagaagctggccaagcactgcccaccctctggctcctcaacagtgccccagggcaggctgaatgagaatcatcccccctgctctcctccccacaggttcacccataccttccctccccgggcaacccagtgccttgtgaagtctccagaggtcaagctcatggaccgaggcggaagccagcccagagcaggtactggctacgcctccccagacaggacccacgtgagtattgggcccacctccgtcagggcacggggctgggaaccctgaggccttgtcctcacctcagagctgtgcctgcaggtcctcgctgcagggaaggctgaagagaccctggaggcctggcgcccaccacgtgagtgccccagtcccagacggacagtcctgggtttctcggcgagtggccggatgtccagcctagctgtggggcgtgggggccctagccatcagttctgtgtggtggagtcagtgccatctgcttccgttacagctccctgccttacgagcctggcgtcctgtgtccctgcttcctccgtgctgcccacagacaggaatctcccaacgcccacatctgcacccaccccaggcctggctcagggtgtccatgccccctccacctgttcctacatggaggccactgccagctcccgtgccaggatatcacgcagcatctccctcggtgacagtgagggccctatcgtggccacactggcccagcccctccgtaggccatcgtccgttggggagctggcctccttgggccaggagcttcaggccatcaccaccgcgacaacacccagtttggacagtgagggccaagagcctgccctgcgttcctggggcaaccacgaggcccgggccaacctgagactgaccctgtcaagtgcctgtgatgggctcctgcagccccccgtggatacccagcctggcgtcaccgtccctgcagtgagcttcccagcccctagccctgtggaagagagcgccctgaggctccacggctctgcctttcgcccaagtctcccagctcctgagtcccctggccttcctgcccaccccagtaacccccagcttccagaggcccggcctggcatccctggcggcactgcctccctcctggagcccacctccggtgagtacagccctggagcaaggactgtcccctaagctcatcctgtgtgctagttggctcagctccaaagatggatacttgacctggccacagggactgtgccattcattcattcgtgcattaacttaaatatttaatgagcattacatgttgggctttgtgctaaaccctgggacatgggacatggtggtaaacaacacagagaactgacagcttcaatggggacaatgcccagactaaacctttaaggaacccgtcatatgtatcacgaagtgacacatgcttaggagggacagaggagggcgagggagtgcagggtggggacaggggttgggattacaaaccagaagataagaagaggcttcagggaggaggctgcattggagcagagacctgtaggagtgaaggggagggagccttggggacccagagaagtgttccagacagaagtacagcatggagtccacccagtcgctctggccgctcacaccaatggaatgcagctcatcttgctcattcccttctctctaccccaggtgcacttggtctgttacagggcagccctgcccgctggagtgagccctgggtgccggttgaagccctgcccccatctccccttgagctgagcagggtggggaacatcttgcacaggctgcagaccaccttccaagaagccctcgacctttaccgtgtggtgagctaagccccagagttgggaaagggttgaggggtctcttgagaccgcccggccttggtggcccctgacaaggctggcatcccttgcagttggtctccagtggccaggtggacaccgggcagcagcaggcacggactgagctggtctccaccttcctgtggatccacagccagctggaggctgaatgcctggtggggactagtgtggccccagcccaggctctgcccagcccaggacccccgtccccaccgacgctgtaccccctggccagcccagacctgcaggccctgctggaacactactcggagctgctggtgcaggccgtgcggaggaaggcacgggggcactgagggcgcagcccctccaccgcagccctgctgcttctgaggacttaggtattttaagcgaataaactgacagctttgaggaatggttcctggtgtctgtttgggcctatccacaaagccctcttcaagtggaagtggggagggagggtagaaggtgatgcccagaggactcgtgtctgtcagtggagagcatgggaccagcgctcccaagaagttcaggaactgcagccatgacctcagggccagtcctcccacactgcccacagagctgccacagaccagtgtgaggtgcttacccagtggggcccatttgtgccccagggaggagccagaccctcttacctgccccctgccagtgcctgagaactcactggggctgctgtgatcaccatgtgcctaccttgcccagcagtccacgctttgccatatcatggctcagggcctctgggccaaggccacactagatcccacaaagtccacggtggtggtgtccccatctgcaacaggggaaactgaggacccatgaacaggcttgcccaagctgggtatggtggcctgcacctataatcccggctactcaggaggctgaggtgggaggatcgcttgaggccaggagtttgagaccagcctgggcaacttggtgaaaccccatctctttatttcatgtatttatttatttatttttgtttttgagatggaatcttgctgtgtcatccaggctagagtgcagtggtgcgatcttggctcactgcaacctccgcctcccgggttcaagcgattctcctgcctcagcctcccgagtagctgggattacaggcacccaccaccatactcagctgatttttgtatttttagtagagacggggttttgccatgttggccaggctggtctcaaactcctgaccttgggagatccgcccacctcggcctcccaaagtgctgggattacaggcatgagccaccgcacctggccaaaaccccgtctctttaaataaaacaaaataaaacaagaaacccaggcaggcttgcccactgtatgatcctggcagcaggcccaggccacgagcagctgggaccaataactgcttccccttcagaagttctacattccacgagctcccagcactgctaccagctcccccagacagcaggcatctggccacatggggtgtctgctaaaaaagccactcttggctggggtgtggtggtgcacacctgtagtcccagctactcaggaggttgaggcaggagaatcgctcaaacccaggaggcagaggtttcagtgagctgagatcacaccatcattgtacttcagcctgggtgacacagcaagtctcaaaaaaaaaaaaaaaaaaaatcctgccagttcccacccaggtgccgggcactgtagcagaaggaacatcaggcaacgcacctgccctcatggccactcaccttctatacagtcaaacagatgcaggaattagagctctgtataattctagataggttggggagatccattgctggtgaagggtcagggaaggcctttcgaggtgacatttgggctgaagcttgatagaggacatctcaggaacacatccaggccgacagcacagccagtgcacaggcctggggcagccacacgtgatctgtgtggaagcaagaggagcgaagcccggacggctggaatggagtgagcaaggggagggcaggagctgaggtgcaaggaggagcagggccttgttgcttcataacatttaagtccaaggaatatccagaacagttttttgtttttgggtttgtttctaaatctctgctcttaatgtttgggggatatccagtgttgcttatttctcacgactctgcctcagggagtccaggtggtccagaacttgaaccacctgcctaggcctaggcccatctgcctagttcggccaccattgcccaaaaccttgcccaacatccctgggcaaagcttggtgttcagccccccaggcctcggacacccaggagaccaccttgggcctctgtcatgcatggaattacccttccttccaacctgtatcatagtaaagtcttctgctccaaggagtaaacacctggctttcagggcccaagatggagggacgttggttacccttgatgtcatcatgcacctggcctcttcctctcctgctctgttatcctctgtgagcaagcttcagtctccagcttatggcctcatggttgcaacacggctgctgtggcacccagcagcacaccctcaggtggtgtctccattttgcaattgttggctttcctgcagccctgactgaagtgcctggcataagcctggaagcgcaggagctagaagctgccccgatagtactgctatggggaggctgaggttagatgtggagtgcagggggctcacagagggtgacagcaggagaggaagaggccaggtgcacaatgacatgagggtcagaggcccaagttattggtcccagctgctgggtggcctggtccaaccaggagcaaaggcacagagcagggcaccctctagggcagcagaaaagatgcagatctctcccaggggtctccctgggagactcatctggggtcagatgagtcccaggcaacaggaatggagattgctttgatgtgcttggaccatctctcctgtcctgggcatgttgcagctcaaacaaagaggttctctcaataagaaaggcaagtgggctggtaatcagagaggatccagcatgtctgccacttccctcttccaaatgccaggctctgtcctggaaggaccatactttctccatacttcttaaccaggataaaccacctggttaagaagccactgctggtggtgcagcatgtgtgcatgtggtttgtgagctgacagggtcccagcagaaagatgacagcatgcttagatgggatattccaaagagtttaaccaagggatcatttgcaaaggagcagcagggactgggaaaccaccgaggctggtgcagaaccccaggactggcaccctgggagctgttaccacccccaggccacaaggcacaaagagaaggaacaagaacccaaaagagcaaatcccagggagagggtagtgctgagggagctgcagccctgactcccacacaggacggagtgagaatcaacaccctgaccttactcccctcctgcagggcaccccattgtccaaatcctactggaagccagagtgcatagaagcccaggtgaccccgcctccagtcaacctcctaggccatggagcagggcagaacaggactgagagggttcctggggaactgggtccctggaaggaaaacagttcatctttcactgcaactccccccctgcttctacccccacatctacccttggcctccccatagcagtaccatcaggacagctcctgggtcctgagctgccaggcccgtgccaggcatcccagtcagggctgcaggaaagccaacaattgcaaaatggagacaccacctgaaaccccattttgcagatgacccacctgaggcctggatgtttgcccagaggagggattcctcggcaggatgcagtggctcattcctgtaatcccaacactttgggaggccaaggcaggcagacggtttgagctcaggagttcaaaaccagccctaggcaacatagcaagactccacctctacaaaaaattttaaaattagctaggtgtggtggtgcacgcctgtagtcccagctacttgggaggttgatgtgggaggatcacttgagcccaggagcttgaggctacagtgagctgtgttcactccactgcactccagcctaggtgacaaagcaaggccctgtctcaaaaaaaaaaaaaaaaaaaaaccttcctaaccaatccctgcttatatgtctgccacatgccaggccccatgctaagcattctctccatgtgagctacatggatcttcaatacaaactgggaagagggagattccttagtctcattttccaggtgaagaaaccgaggcccaatgagaaatgacttgctctgggtcctgcagagagcaagcggaaatgcatggccagcagaccctcagcactgccacccttgcttccccaaatgaattggcacaactgactctcgggcaatgtaaagaaatgaagaaatactcctctcaccagcaagccttgtacagatgtccccctctgactagaacaccctcccctttcatctgaaacctttcagcgcttatccaggaagccatccctgtacccgtagcctggatcaggagcctgttcgggtccccaggtacccctcttttccccatcatggctgggtctctgcctcacttgcctctcactgtcttggtcattctgggctgtcactggtgtgcctccttcatggacttacgcgatcattt[134 bp omitted]acatggtgaaaccctatctctactaaaaatacaaaaattagccgggtgtggtggtgcgcacctgtagtcccagctacttgggggactgaggcagcagaatcgcttgaacccaggagacggaggctgcagtgtgtggagatcgtaccactgcactccagcctgggcaacagagtgagaatct[144 bp omitted]gtgaaaccccatctctacaaaaaacacaaaaaatcagctgggtgcagtggtgtgcccctgtaatcccagctacttggaaggctgaggcaggagactcacttgaacccaggaggcggaggtcatagaggagccaagatcacgccattgcactccagcctgggcaacgagcaaaactccgcctcaaaaaaaaaaaattaaaaaacagagcttggattgcttcttagtcttctggctaagaatcaagtgtaaaacagcttggccagtgtgccggggtagggtcctgggagcccctggctgtgtcaagagaccccctttgggccaggtgcggtggctcatgcctgtaatcccagcactttgggaggccaaggcaggcggatcacttgacgtcaggagttcaagactagcctggccaacatggtgaaactctgtctctaccaaaaatacaaaaattagcccggtgtggtggtgcatgcctgtagtcccagctactcaggaggctgaggcaggagaatcgtttgaacccgggaggtggaggttccagtgagccaagatggtgccactgcactccagcctgggcaacaagagtgaaactccgtctcaaaaaaagaaaaaaaaataggagacccccttttactttccagactgtgggagggaggaagagtgttgtcccaggcagtaactaggggctagattattaacaaactagtattttagtgcctgctacacctgaacagtgcttctggctgaatgttagccctgggaatctgaagatcagagaggtggggcatcctacctgaggatgcacagcctggatcctcattttgccctgatttatccagatctgctgtcctccctgcaccctacagagcagggcaatcacagcagggggccccttcagtgtcctcagacagctgctgtgatttgaataaccaggcaggctgctggatgtcccctggtgactgatttgcctggcaaacagaccctcaacccctgggagacagtccccctggggccttgtttcttcttcctatcctcaaaagctccccaggcccatctccccttgcctggctctgcttggtggtcctagtgcttgtccacccctggaggctggatggttccctccaaaacctgggagaagatgggcaggtccccaggcaggggtaacctgagccagcttagtccactcccagggccagccaggaaatttgcatgaagagaatgaggttcctcagaggcttcccctcctttcccaccagggatagtcatcctggggctgaggtctgacagcaggtggaagcagcccctgtgtgtggagagccttccggagggcatgccccgcgccttcctggtcaggagtcggcgtccacagccccccaactggggccatctgcctgaccagctccggggagatgcctatatcccaggtgggcccctcactgtgcctggaggtaaggggcaggagagacgcagtgtcaccatctggcttttctcctcagactgcagcagcctgggggggccaccggcacaacagtcgtccagtgtcagggatccgtggacagcggtgagtgtgtaactggctagcaaagccagctgtttcgctcctgcctgctctcagccttaatgaagctgacagccccttgctcccccgacccatctgcacacgccctccagcctcgggacctgtccgcccctacttctctgtgttgggaatgcctctcctttcctagtagtgagctctctactgttaggtctcaccccaggcaccagggccggcagccacagggatctcttccagcggggcacaagattcatccccacatgtggatgatccgctttatgtcagaacatgggacaaggcaacaggagtgcgatgggagataagggctttttcagctgtgcatgcattggaggaaggaaagcgccagccggaatgtaatatattcatgaaagcaaggcactgttctaggcatgggctgttatattcagcgggaataagacaaaaatccacaattttatggagcttatattctggttggggctgcatgtatagacaataaaattagtcagcctgtaattccagcactttgggaggccgaggcgggtgaatcacttgaggtcatgagttcgagaccaggctggccaacatgttgaaaccttgtctctactaaaattacaaacattagccagacatggtggcacgtgcctgtaatcccagctcctcaggaggctgaggcaggagaatcagttgaacctaggaggcagggcagaggatgcagtgagccgagtctgcgccactgcactccagcctgggaaacagatctagactccatcccccctcaaaaaaaacaataaaattagaaaaatagaccgggcatagtggctcatgcctgtaatcccagcactttgtgaggccaaggtgggtggattgcttgaggtcaggaattcaagaccagcctggccaacatggtgaaaccccatctctacaaaaaataaaaaaattaactgggcatgtggcgcatgcctacaatcgtgtaatcgtggggaggctgaggcactagaatcgcttgaacccgggaggcggaggttgcagtgacctgacatcataccacttcactcctgcctgggcgacagagcaagactctgtctttaaaaaaaaaaaatgtgtatgtcacatcagaagatgggacttggcatagagaaagtaaggaccatgggatagtgagggaaggccctggagagtgacaggcacacacactaatcactgtctcccacctgccttcctaatcctccgtggtggctcaggacactctgtaaatactcatttgcagagtaacaaagggtggatggggtccagccagagaggctaataactcctgcatccctccagcagcccacacagggcaacctgacctctgctcccaggggccctgggacgctgggctgcccgctctgccctaaggccttccctctgcagcgcatgctgacaaggcacctcaagtgccacagccccgtgcgccgccacctgtgccgctgttgtggcaagggctttcatgacgccttcgatctcaagcgccacatgaggactcacactggtgagcagtggcagggacagggaaaagttgctgggccccaggtggggatggaaggaaatggagagaggtgctgggctgtggagtgtccatggtttgtgtatgtggggtatggagaatcaagacatgatgtctctcggaccccagtgggtgggtgtaaggtggcaccaaaataggggcctgtcacggaatgcagagtgcagacggatgccggttatacgattcaggctccagatcgaaaggcaagggaaggcctccctctccatcccccaggggagggagcatcctggtgagggagagtggagacacaggtgtctggcccatgtctgcactgggtgacggtagcagatggtgggtcatgggcggaagagtctgaagagcttggaataggtaccagaaatgctcaacactggaaagcagggtgggggcgctttagtccagagcccattgccctctctgtccagccctcccctctgcgcccatctgtgcagggatccggcccttccgctgcagtgcttgcgggaaagcgtttacgcagcgctgctccctggaagctcaccttgctaaggtgcatggacagccggccagctacgcttaccgtgagcgccgcgagaagctgcacgtgtgcgaggactgcggcttcaccagctcccggcccgacacctacgcacagcaccgcgccctgcaccgcgcagcctgatacggtgtgccagcgtcctccccacgaggcaaataaacacagaaaactcacgcatggaatctggtgtttattacactcgggggagagaggaggtcactcggtccagcggtggccgcagtgtggggctgtgcacacgtagtaaaggcgcatggcgtcctggcagaaatgatgcatggttaggaaggatttggacccagcagcgccttaccccaaaagaacaggcaagagaacttcaccaataggtaagggcccggcagagttccaagaagcgcagggtcacccacattgatatccccgcccccagaaaggaccaaacaagccccagatacttagaaagccctcgcgccacttacctcggcccgcgcactgtgtgactggaagaacacagcctccttgtggccgcacctgagagggtaggggctcggtcaccggaggcttcacacccttccctcctcccttcgcccagtgaggagacgagcctcactttacctccccagtaccagctgaacgctcacttttggcacgggtggtcctcggtccgcggcaacgtggggtcctgggacacgtcggcgataatctgggtcagttcgctgcagggacgcgggggtgcaaaattacgctcagacccagcctccagagccaacacccccgcccccagctcagggcccgccactcactccacttcgtgcgtgatcttgttgacatagatgcagctgttgtcggcctcctgctggtaatcacagttccggcactacgagagggcgagtgtgggggaaagggggtcacggaaggattccagacaagattgggaggagagggcagggtgatcccggaggatatgacgacaggactctctttggggatgggcaggacatgagagtcaggatcacttgaggtgcagcggagggcgaacagggagtccgatcacagaggcagggggcagggcggggccacgctgggaacaggtggacctgccggggaagaccccggcgctcaccgcgtagagcagaatgcggttctccttgtcttccttggggtacagcatgttgttactgtggggagggggaggtgccaggggttagttctggagccattcctcgcccgccttctaacatcacccgctccctccgcctcaccattcctggcagaagcgaatacccacgaagcccggctcgtaagtcccgtcgggctccatggcgacgcgcagcccgcgcagccctcccagccttccgcgcttgctccgccgcgctacaggtcgcgggaggggccaggcctaggtgcttcgccaaaagagggcggagctgcgcacacgtgctggctccccgccgcctcgggctcggctctctccgcgcagaggtttcatggcttgcttcaatcttttgatatcttagagtaattgcttccaatttttgggcatcgccgcctcagtttacagaatagtatggatctggtgccagagccgggaaaacgatgcgcatcgtaaaccgcaaaacactgagcatccaggacagaagccaaggcgcttggcttggttgaaggccagtgcgcatgcgcgagtttacccttcgcggactgggcgagctcttgccactcctacctccgggcttcagtcttcgccgcctgttctggtcctttcccgggccgctattggaagaaccgtgaactatggaaggcccctctggattggctgggctggcccaagagtaaggagagccctcttcctggcggtggggaagggacggcggcgattggcggacgctcctggcaggagagcgcggattggtcaggcacggagcaggaggcggggctgatagcccagcagcagcagcggcggcggcggctgcggagcgggtgtgaggcggctggaccgcgctgcaggcatccgcagggcgcggcaagatggaggtgacgggggtgtcggcacccacggtgaccgttttcatcagcagctccctcaacaccttccgctccgagaagcgatacagccgcagcctcaccatcgctgagttcaaggtgtggccatgggggcggggtccggaggggcggggcgaagaaattggggggttcccggaagggggaggctgggaggggccggggagtgactgggcgggcccggaggtgatcccaggctgcggaggctggggacccggtcgcggcggggcgggtccggagagaactcgagagtgcagagatgagggccgggtccagcgaaaaatccgacggtccagagggcgggggcaagaggcgaggggctggattgcggccccgtgcgtcctgactggggggtcttttggaggaaaagggacgtggcgatggtcattgatgcaaggggcggggcctccgtggcctccttcttctcaccctgcctcctcctcacagtgtaaactggagttgctggtgggcagccctgcttcctgcatggaactggagctgtatggagttgacgacaagttctacagcaagctggatcaagaggatgcgctcctgggctcctaccctgtagatgacggctgccgcatccacgtgaggactctctatctgggacactcccccaccccacctttcatttggttattcaacagacacttgctgggctttgccctcagtcatacccgagataggtcctgccttcgtggagcctccagtgcagcctgacgagagacagacccatcattagacagggacagcctagagtggtctgggctgggatcaggaaatcccaggggactggagccaccaagaagaggtgcctgactccacctgggagaatcagagagggcttcctggaggaagggatgtctgagctgagggatgaggaaagggtgacttaagagaaagaggtggaaaggagggagcagggtgtacagaggcctagaatgtgaggtaggtcacagtgagcgaccaggctggacagcttgggagaaaccagaacacaggatctctttgtgcatccactcagtacatcctttctgtctttttttgagacagagtctcactctgtcacccaacctggaatggagtgcagtggcactatcgggctcactgcagccttcacctcctgggttcaagtgatccttgtgccccagcctcccgagtagctgggattacaggtgcccacccagctaatttttgtatttttagtagagatgggtttttgccatgttggccaggctggtctggaactcctgacctcaagtgatcagctcaccttggcctactaaagtgctgggattacaggcgtgagccaccaagcccagcccctttctgtccttattccctcccgacctcactcagtctgtagcagccacattgctccttgcacagtccaggtgagctcggcctctggatcctgggcctgaatggttcttttgtcatatgcctgcgtgcctcacccttccttcctgtcttaatttaaagtgtcagtattctagtgaagtcttcaccggcctcagtgttaacgtttacctcattcctttccccttctttgctttattttagatttttgtgtttacaagtaattctcctctgacacactctggatttctctcatctggtttatttactctctgtctccctggattcgagtgccctgagggtggaaattttgatcactataattcactactgtgtccccagtacttggaatagtgcctgggacagggaggatagtccgtgaatcgttttttgttttgttttgttcgagacagagttttgcccttgttccccaggccggaatgcagtggtgtgatctcagctcactgcaacctctgtctcctgggttcaagctattctcctgcctcagcctcccaagtagctgggattacaggtgtgcaccaccacgcctggctaattttgtaattttgtattttaagtagagttggggtttcaccatgttggccaggctggtcttgaactcctgacctcaagtgatctgcccacctcagcctcgcaaagtgctgggattacaggcatgagccaccacgcccagccctgtgaatcattgttgaatgatgaattgaatccataaagtaagaccacaaggataatgtaattatccccattttgcagaagagaaaatttagcttcagggtggagtttatttatttattttttattttttttgagacagagtcttgctctgtctcccaggctggcgtgcagtggcatgatctcggctcactgcaacctccgcctccccggttcaagcgattctcctgcctcagcctcccgagtaggtgggattacagatgcccgccactacaccagggtaatttttgtatttttagtagagacggggtttcaccatgttagtcagactggtctcgaactcctgacctcaggtaatccgcccacctcggcctcccaaagtgctgggattacaggcatgagccaccgcacccggcccagaatctactttcttaaggatgaactgtcagtagcattttggccccagtctacatgactctagagagaactgcttcttttttctctcgttgattaactgttcattccccatctgtgttgtgccaggggtttcattatgactgcatctgagaagttctagtgtatgaggcagatgttggctaaatggccagaggactgaatgtgaagggtcaggggagacaagggttgtgtaggagatcatgaagctgggagaccctatcctggggtacctgatgcatcagtgacgtctgggaggacatcctggaggtggtgctgctggagcagagacgagaagaataaaaagaattggtcgggcatggtggttcacgcctgtaatcccagtgccttgggaggctgaggtggacagatcacttaaggtcaggagttcgagacggtgaaaccccgtctctcctaaaaatacagaaattagctgggcgtggtggcagatgcctgtaatcctagctactcaggaggctgaggcaggaggatcacttgaacccaggagctggaagttgcagtgagctgagatcacaccactgcactccagtttggatgatagagtgagatcctatctttaaaaaaaaaaaaaaaaaaaaggttaactgaagatggggaaggggtgccctaggagtggggcacaacccagcaaacactccaaggtgggagggagcgcggtggggattaagacaggccacttctgtggccaaacactgtggaagctggggaggaccctgacctggctcaggtgttcacaggccccctctggctgtgtgtggggaacaggtggtggaggacaggaagagtagggagaccaggaaggggctgctgtgagagtcctgatgaggggacgaggtctggagctgtgggtcaggcctctgctgggtgcacaggactgagcctttgggccaccctgggcagctgaagctaaggggtgcgggtgttcataggcacctcataggcagtggcatctttgagcaggtttcataacaggcggttcaggtacacacagacctcccaggccactcaaggaaggtgttccagagtggagccactggggaatttttacattttctaaaattctttttctctttataaatatcacccatattcattgtttaaaataacagaacttcaaatttgtgaaaattctcaacagaaattctcagtgacgcttcatccggaggtaaaggccattcctattttgccatgttagcccagtggcttaggccagacacctcagggtgttccttgggcccgctctctccctcacccccacatccactctcatcaaatcctctcggctccacctacaaaaacttccctgaccctggtccagcctccatccttcccccaacctcgccatcccggcagcttcctccctggcctccccgctccccatctcagccagagggagcctgggaccacctgagtcaggccagggccctcctagctcagagccctgccctggtggcacttcgctccagataaaaaccaaagtctaggccaggtgcggtggatcgtgcctgtaatcccacccagtacattgggaggctgaggtgggaagatcacttgaggtcaggagttctagaccagcctgaccagcatggcaaaatgtcgtctctacttaaaaatacaaaaattagccgggtgtggtggtgtgtgcctatagtttcagctgcccgggaggctgaggcaggagaatcacttgaatttgcagtgaggcagaggtttccgtgagctgagatcacaccaccacactccagcctgggtgacagagcgagactccgtcaaaaaaaaaaaaaaaacccaaagtctccagcagtcccttgtgtcttccactctccctctggctcgctccaccccacccgcaccacccactctagagcgtgaaggacatttctacctctggccgtctgcacctgccgttcttgctcatctttccagccttggctgaaacatcccctcttttgggaagcctaccctcccatgctccttaagcctcttccctgtcatatttttctccatagccatcctccagtgtttcataggtacctgttcctttgtttgtggttggccttctccctgcacaatgagcacagcctgagggcagagtgcgtctgtgtttacactgagtccccagcatgaggcccagctgggcccctgggagctcggaaaccaatgaatgaatgaatagtgggggcagaacaggaagagatgctctggggcctgaggttggggccagcttaggagagtcccagaggcccatcgaggagatgcgctgtgcacagggctgtgggcaaggcctgagctctgccggttggactctgtgactttggggcccttggcgatgttgatgccagcaagcggggaacttctggggacagaggcagcctctgggagcttggatgggggtgaggaaggggaggtggccagtgtacgtagctacttctcccttccgctgggctcaggagagaagagaaggctgcagtacaggcgagggagggagatgcgtttttcccagatggagacactgaagtccctgcacccagcacccaggcctccctggccagaccctgatccccacggagcccctcccctcacacaggtcattgaccacagtggcgcccgccttggtgagtatgaggacgtgtcccgggtggagaagtacacgatctcacaagaagcctacgaccagaggcaaggtacgggcaggtgggcgtcgaggggtgcgtgggggccagagggagtatgtgcaggtatgagggcgggcaggttagacagggcccctgcagggaggccagtggtgtagacggggggccgagagcttgggaggatataggggtgaggctgggagtggggacagacggaggcctggggtgggaatgagggccgggaggtgtcaggggtatgggcagtcagacgtggtcgggggagggctgggaaagtggagggagttgaggggtaggtgtgggggctgggtgttgtcagggtcagatgggggcatggggcggtcggacggggtgtggagggcaggacaggtggaatgcgagtggacagggtggcggtcagtgagggcgcctgggacggatcgagtgttgggggagaccgggggcctcagggccggaggagggcggaggaggaaggcggatgatgaaggcagatgtgcgctgaaggggtgagagaccatgggtcctgtagtgaggggtgcaggcggcaccccttccatttacgattgtggagttggggggcctaggagtcctgggagaggctaaggctgtggtgggagacctggggcttgggtgacagccctttgtcacctggaagagagagttcctccgtgaacgtgggcccctcgtgggtggagcgtcatcctgttaggcccggccgacaccccaactgaccccagccccctctgcccacagacacggtccgctctttcctgaagcgcagcaagctcggccggtacaacgaggaggagcgggctcagcaggaggccgaggccgcccagcgcctggccgaggagaaggcccaggccagctccatccccgtgggcagccgctgtgaggtgcgggcggcgggacaatcccctcgccggggcaccgtcatgtatgtaggtgcgtggctcgcgggcccggtcccgggctccagggctccaaggccgggaggaaatgttgggggcacagtggagcctcggagaccacgctctgcctaggggcgcggggttgggggggactcgaaacgatctcagtccctggaggtgacggaaccatctgccgacactgacggcccagagtgtttgtggagggaagtgggaggcgcaggcggagtgatctgtccagcgagggaggaagcagaagccagaggcacgcggcctgtgcgcttcgaagcgtggggcagtgtcagtcgcggtggggaaacgggcggcgtgaccaaggcaggagtgagggaacacagggggctgtgtgagcccagaggaagcacctggaggctgggagcatctgaaggaaaggaggcagcagccaggtgaaaagggaggaagagttcccgccagaaggagtagcgggtgcaggtgagcagagcgcaggaggtccacctggggaaggggagcgggaggagaggggagaagtgtagtcaggggcatgggcagggcggcgtcacagtggagagcagtgtggatttttttaaaaagaacaggctaggcatgatggctcacgcctgtaaactcagcactttgggagaacaaggtgggaggcttgcttgagccccggagttggaggttacagtgagctatgattgtgtcattgcaccctagcctgggc[132 bp omitted]gagaccctgtctctacaaaaaaaaaaaaaaaaaaatcccacaaaacttttgtcagttgtggtggtgagcacctataggtgccccagctacttgggaggctgaggtgggaggatggcttgagcccgggagttgaggctgcagtgagctatgatcgcaccactgcactgcagcctgggtgacagagggagaccctgtctccaaaaaaaaaaaaaaaaaaagatacacggggtacatatatgtattgttacatgggtgtgttgcctgctagtgggtggggaccgggcttctagtgtacccatgacccaaattgtgaacatcgtacccaacagataatttttcaaccctcaccaccctcctgtttctggcatccccactgtctggtatttccgtctttatgcctgtgtgtacccatcccccagtcgtcttcagccactaatttacgtctgtctctaatttgccgattctggatgtttcataggaataggatcatgcagtctgtggccttttgtaactggcgccttccactgagcagaatgctttcaagtttcatccgtggcatgcctgtgtcagtgccacactgttgccaaatagtcctgcattgagcgcctagaccacagtgtatccagtcaccagttagtggacattagggtcatttccactttttggctattatgaataatgctgctatgaaccttcttcttttttttttttttttttttctaatttgagacagcatctggctattgcccaggctggaatgcagtggcacaatctcggccatttcagccttaacctcttgggctcaagccatcctcccacctcggcctcctgagtagctgggaatacaggtactcatcaccacccccggctaaagttttgtggttttttttgtaggatgggatttcgccatgtggcccaggctggtctcaaactcttcccgctcaagtgatcgtcctgcttcagcctcccaaagtgctgggattacaggtgtgagccaccatgctaggcctgaacattcttttataaatttctgtgtggctgggcatggtggctcatgcctgtaattccagcactttgggaggccaaggtgggcagatcacctgagatcaggaattttgagaccagcctggccaacatggtgaaaccccatctctactaaaaattcaaaaattaactgggcgtggtggcgggtgcctgtgatcgcagctacccggaaggctgaggcaggagaatcgcttgagcctgggaggcggaggttgcagtgagccaagatcacaccactgcactccagcctgggcaaccatgcaagactccatctcaaaaaataaaaaatacatttttatgtggacatttgttttcatttctctgtgcctaggagtggaatccctgggccacatggtaacactgtgcttgacttttttgaggacctgccacactgcttcccacagccgctgcagcagttttcattcccgccagcagtgcagaagggtcccattttgtcctcatcctcaccagcactttagtctgtcttttgcttacagtcatccactgggtgtgaagtggaacatcatcatggttttgatttgcacttctttggcagctaatgatgttgagcatctttgcatggccatttgtgtatcttctttggagaaatgtctattcagatcctttgccttttgttttttgacacacagtctcactccgtcacccaggctggagtgcagtggtgctctcagctcactgcatcctctgcctcccgggttcaagcaattctcatgcctcagcctcccgagtagctgggattataggtgagcgctacaacacctggctaatttctgtatttttagtagagacagggttttgccatgttggccaggctggtctcaaactcctggcctcaagtgatccacctgagctggtggatctcccaaagtgctaggattacaaacatgagccactgcgcccatcggtatgtcggggtttggttttgttttttttcttttgagacgtaatctcgctttgtgcccaggctggaatacagtggcatgatctcagctcgctcgttccaacctccgcctcccgggttcaaacggttctcctgcctcagcctcccgagtagctggaactacaggcgcccgccaccacacccggctaattttttgtatttttagtagagacggggcttcaccgtgttagc[132 bp omitted]catgatcgtggctcactgcagcctcaacttcctgttgcccactttgtaatgggattttttttttgcaaagtgggtgttctttgagttccttgtatattcttctgctcagtttttcattgggatgctgtcttttgtcgctgagttgtgtattagtttgctaacaaagtaccactcactgagcaacttaaagttatttctcacagtaatggaggctagaagttcaagatcaagctgtcagcaggttggatttattctgaagcctctctctctggcaaggcagtagtgccatcccccttaggtttttacaaagccctcactggctggtgtcttcacccagtgaatgggggacaggggtggaagcagggacaccagtgaagtggctaccatattagtcccggcaggagctggaggtggtcctagtggtagcaatagaggtagcaagaaatggttttcaccaagacaggcttctactcaatgggtaggcatggatccagggtgatcctgaaatttcatggggatttcttctatgtccagaagcttcacagggatttctcttctgttggcaggtctcacagatttcaagcctggctactggattggtgtccgctatgatgagccactggggaaaaatgatggcaggtaacaagaattcccactcaggtgtctgtgtgtgcatttgtgtgtaagtccatgcgtgctgcttgctgagctgcccatgccagcttctagagtggagccatgtgagggtcctctgaccacacccacccctatcctttcctgcagtgtgaatgggaaacgctacttcgaatgccaggccaagtatggcgcctttgtcaagccagcagtcgtgacggtgggggacttcccggaggaggactacgggttggacgagatatgacacctaaggaattcccctgcttcagctcctagctcagccactgactgcccctcctgtgtgtgcccatggcccttttctcctgaccccattttaattttattcattttttcctttgccattgatttttgagactcatgcattaaattcactagaaacccagaaagtatttagaggacttcatgatttggggacccactgggtaaatagtggcccttcggtatcaggggccagcctctgtctcctcatatcttgctgttcccccatcttctcatcattcccacctcatctgctgtagctaccaggaagaaagggaagggaagggaggggatatcctttgcctttaaaaatgatgtacagccagctgggcacggtggctcacgcctgtaatcccacactttgggaggccagggcgggtggatcacgaggtcaggagatcgagaccatcctggctaacacggtgaaaccctttctctactaaaaatacaaaaaaattagccgggcatggtggtgggtgctgtagtcccagctgctggggaggctgaggcaggagaatggcgagaacctgggaggcggagcttgcagtgagccaagatcatgccactgcactccagcctgggcgacagagcgagactgtctcaaaaaaaaagatgtacaactctggctggatgtggtggctcacacctataatcccagcactttgggaggccgaggcaggcggatcatgaggtcaggagatcgagaccatcctggctaacatggtgaaaccccatctctacaaaaaataaaaataaaaaaattagccaagcatggtggcgggcgcctgtagtcccagctactcaggaggctgaggcaggagaatggcgtgaacccgggaggcagagcttgcagtgagctgagatcacgccactgtactccagcctgggcaacagagcgagactccgtctcaaaaaaaaaaaaaaaaaaaaaaaaaaaagatgtacaactcagccaggcacagtggctcatgcctgtaatcccagcactttgggaggccgagctggcaggtcgcttaagcccaggagtttgagatcagcctggacaacatggtaaaacttcatctctacaaaaatgcaaaaaatgagtcaggtatggtggcgcatgcctgtagccccagctacttgggaggctgaggtgggagaatcacttaagcccagaaggtcaaggctacagcgagttatggcaccactgcattccagcctggatgacagagcaagaccctgtctcaaaaccaaaaaaaaagaaaagaggccaagcacggtggcccacgcctgtaatcccagcattttgggaggccgaggcgggagatcgagatcatcctggccaacatggtgaaaccctgactctactaaaaatacaaaaattagctgggtgtggtggcgcgtgcctgtaatcccagctactcaggaggctgaggcaggagaatggcttgaacccaggaggtggagattgcagtgagctgagatcgtgccacttcactccagcctggggacaagagtgagactccgtctcaaaaaaaagaaaaaaagccaggcatggtggcttatgcccataatcccagcactccgggaggccgaggagggcagaccacttgagttcaggagttcaagaccagcctgggcaacatggcaaaaaccctgtctctacaaaaaatacaacaacaacaaaaattagccgggtgtggtggcacgcacctgtagtcccagctacttggaaggctaggtggtaggatcacttgagccttgggaggtagaagctgcagtgagctgtgttcacaccactgcactccagcctgggtgacacagcgagactccatgccgtgacaccagcacgtggcgtgtcacattattaaggattatacagccaacagttactgggctggtttcctttaatcctcacagcaggccctgtccgcaagtctttcaccgtttcccgtcaacactccacctttcctgcccaaagtttggggttgggagggaattcccaggggttcccaggacttgggctcgcctcccagatcccgcaacctttgcgtgcctagcctcggcaatgaccgcccatctgccacgagggggcggcagcgcaccgttcagacgctgcgcccctggtgcattatgggtcgcgtagtctcaaaggtggcataagcatcctggaacgcaaacggcatttcccagaaaactacgcgacaatctgagcctggtcttgcccagagctggaagctgaggtctcgcccctgccggcgttgcgggggattgtgggatgtaggcatttggctccgcgctccgcgaagggcggtgcagcgcaggcgcgggcatccggtacagacagccgagcttaatctgaggcggggaaccagcgtcccgggggaggcgccgaagctgactttctggccgcagtggaagtgaggcgagcgagctcccttagtggctggagccggctgggcctccttcctgtcctcctgctttcctgcatctctacttgtccctttccccgggctcctggtccgctcccaagcctgttcaagcacgaggcgtttccatctaaaaaaagaaaagaaatctcttttgccgggcgagatgtcagagccccgggagcgaaagtgttggtaatgttagacagaatgagttcctcttcaaaaatctaacttccttgtcctttgctctatgaactgtccttcctgcagaaactgcccttaccggggaaactgcccctccccgccgctgcaacccataccccgcctctattagaaataggcaatcggaatcagcttagattgtgaggtccaaccctagccaacgggggttaaaaacccctgctctcctttattaggtgtgcttttggtacaggtctgggcagcacgcttctgcagaagtaaactttgccttgctaagaaacttttctccgagtgctggtctctctctgtggcaccaagaacttatttctaacagtaagaagaatttactgaggac[132 bp omitted]tacagtgaaaccccatctctactaaaatacaaaaaactaactgggcatgccagcatgtgcctgtagtcccagctacttgggaggctgaggcaggagaattgcttgaacccaggaggtggaggttgcagtgagctgacatcatgccactgcattccagcttgggtgacagaatgagactccatctcaaaaaaaaaaaaaaaaaaaaaaaatgaaggaaagaatgctgcaggccaggcagggtggctcacacctgtaatcccagcactttgggaggccgaggcaggcgaatcacctgaggttgggagttcaagaccagcctgaccaacatggagaaactactaaaaatacaaaattaggcgggcatggtggcccatacctataatcccagctacttgggaggctgagataggagaatcgcttgaacccaggaggcggaggttgtggcaagccaagatcacaccattgcactccagcctgggcaacaaaagcgaaactccatttcaaaaaaaaagagctgatttttttgtttgttttttagacagcgtcttgctctgttatccagcctgtgtgtgatcccggcggtgtgatctgagctcactgtagcctcaacttcccgggctcaagtgctcctcccacctcagtaggccccatgaatagctgagactacaggcacatgccaccacacccagctaatttctgtattatttgtagaggtggggtttcgccatgttgctcaggctggagtgcagtggcacaatctcggctcactgcagcctcaggctcctgggctcaagcaatcctcccacctcagtctcccaaagtgctgggattccaggtgtgagccactgcgcacggccaagaataaagattttaataaagtaatgtgaaattaacatgaaaagccaataaggaaactgggcaaatatttgaaaagacaatacataaaagaaacaccaatagccaaaaaaccatgaaagccaagttcacccccattcatatttgaagaatgttacataaaatattgagacaccaccttttgcctgtcaaatcaggaaagatgtttatttttattttttatttttgagacagggtctctctgtcatccaggctggagtatggggcacaatttcgtctcattgcaacctcaaactcctgggctccagcgatcctcccaccccagcctcccaagtagctaggagcacgggcacaccactatgcctggctaattttttcaaaacacttttttgtagagatggagtcttgctatgttgcccaaactggtctcaaactcctgagctcaagtgattctcccacttcagcctcccaaagtgctgggattataggcataagccgccatgccacaaaattttacaagaaaatttcagccagcatttgacaagattccaggggacatgaatgaaatacctaaagataaaagagttccttgaggccagttaaggtggctcatgcctgtaatcccaccactttgggaggccaaggcagtggatcacaaggtcaggagttcaagaccagcctggccaatatagtgaaaccctgttttactaaaaatacaaaaattagcctggcatagtggcgggcacctgtaatcccagctactcaggaggctgaggcaggagaatcgcttgaacttgggaggtagatgttgcagtgagctgagatcacagcaatgcactccagcctacagagcgagagacccctctcaaaaaaaaaaaaaaaaaaaaaggagttccttgacaaaagaaatgtggaatttgctgccttgaactaagttaaattagctgctttgttgcaggaattttcattaatatgctagtccatgataacctgtataaaaggatcctcttgggcattactttctgggttttttgtttgttttcagaaacagggtcttgctctgtcatccaggctggagtgtcatggtgtgatcatatatcatatctcactgcagcctcgaatttctgggctcaagctatcttccagcctgaacctcctgagtagctaggactgcaggtgtgtgccaccatgcccagctaattaaaaaacttatttttgtacagatgaggtctcattatgttgcctagagtggtctctattcctgggctcaagaaatcctcccctctcagcctcccaaagcactgagataacgtgtgtgccactgtgcttggcctgaattttttattttaaaatacattttgtgagctgtgcttagtaatgcacacctgtagtcctagctacttaagaggctgaggcaggggcatcgcttgagcctaggagtttgagaccagcctggacaacacaggaaaaccccatctttacaaataatcaaaaaattagccattactcgggaggctgaggcatgagaatcgcttgagcctgagaagttgagctgcagtgagctgtgattgcaccactgcactccagtctggctgggtgacagagcatgaccctgtctcaaaaaaaaaaaaaaaaggaaaaaaaattattcaacaacagttgttaaagcacaggaagggctgggcacggtggcttccgcctgtaatcccagcactttgggtggctgaggcaggcagatcacatgaggtcaggagttcaagaccagcctggccaaaatggtgaaaccccgtctctactaaaaacacaaaaattagctgggcgtggtggcccacacctgtaatcctagccactggagaggctgaagcatgagaatctcttgaactcgagaggcagaggttgcagtgagccaagatcacgccactgcactccagcctaggcaacagaacgagactccatctcaaaaaattaaaaaaattaaaaatagaataaggcacaggaaaggaaggctttattcagagccattacgatagagagaggggccacagtggcagggccttgcagtgagggagacaggttgggctcaactccaaatactgcatggggaagtgggaattcatagcccaggatcgggtggggcgcagtggattgaaagttactaagaggaaacatcaggggtaaggggggattctggctaaaccagcctaacaggattcttgctgaagacaggcccaggtgatcagacatcacataggggctggtggaggatgaggaacctaatcagatgttgaagatgggagagggttctcgataaactgacttagcagggttctttgctaaaactggatttgacaagggagtacacagatgagcctagcagaagattcagagacttgactagtttggccatgcaagaatttcttttttgttttgtttttttctgtttgttttgttcggctcactgcaacctccacctcctgggttcaagcgattctcttccctcagcctgtggagtagctggaattacaggtgcctgccaccacacccggtttgtgtgtgggtgtgtgtatttttagtagagatggggttttgccatgttggccaggctggtctcgaactcctgacctcaagagatccacccacctcagcctcccaaagtgctgggattacaggtgttgagccacctcgcccggcccaagcaaataatttttatcagggaattgactccaaagaaaaacaataggagaggaggtcctgcagggtcacagcccatacaagagtctggccgcaaggaagcctggtaagaggagagggaacagagcggtgctgacctgctgaagggaaggcagaggtcggacaggtacccggattagtcatcacataacaacttggcatcagccatgctctgccatctactgtgtggcctcaggcaagtgactcactctctctgaacatccacttcctctcatgttggtttctttctcagaggcttgtgagaggccttggcaagccatggccataaagcaatcactggctgggcatggtccctcacgcctgtaatcccagcacttttggggcaccgaggtgggaggatcacttgaggccaggagttcaagaccagcctgggcaacatagtgagacctggtccttacaaaaaataaaaaaatgattcaggtgtggtggtgcacacctgtagtcccagctactctggaggctaaggtgggaggatcccttgagcctaggattttgaggttgcagtgagctataattgtgccactgccctccagcctgggtaatgaagtgagaccctgtctcacttttttttttttttttttttgacatggagtcttgctctgtcaccaggctggagtccagtggtacgatcttggctcactgcaacctctgcctcccgggttcaagtgattctcgtgccacagtctcccgagtagctgggattacaggcactcaccaccacacccagctaatttttgtatttttagtagagacggggtttcaccatattggccaggctggtctccatctcctgacctagtgatccacccgccttggcctcccaaagtgctggaattacaggtgtgagccactgcacctggccaagaaaaaaatttcttgcttatacaaagtcagctgtgggtctgggtgactatcaagagcagaagtgctcgatgccagggctcggccctcttccttcatgtggcacctccaggtttgctcagctcctagtgtgacccgggcaggagaaaacagagcatggagcattctgcactgccttcccctgcgcccgccataaacacaaggtcttgctctgtccactgggctggagtgcaatggttgcactggtttttaaatgcttctacaaggagcatttaaagtgttctacatccaacacttctacttacattttattggccaaagtaagtcagataactcctgagttcagcagatcctgggagatggcggagggcattagtaatgcttgccctactgtctcactgctggtgctgaaaatccaatgagaaaatacacacaaaacatattcattcattcaacaaatgtttactgggcacctatgatgtgccaaccactgttctaggaactggatacatacctctgagtgagtacatagcagtgaacaagacatatagaaatcccagtccagccgggtgcagtggctcacacatgtaatcccagcactttgggaggccaagcggatggatcacctgaggtcaggagttcaagacaagcttggccaagatggtgaaacaccatctctactaaaaatacaaaaattagctgggcgtggtggcgggtgcctgtaatcccagctactcgagaggctgaggcagagaattgcttgaacccaggaggtggaggttgcagtgagccgagatcgagccactgcactccagcctaggcaacagagtgagactccgtctcaaaaaaaaaaaaaaatagaagtcccagtccgtggcaagctcacatactagcggaggagacagaaatctggatcaatatgtaaagtacacagggctgggcgtggtggctcatgcctgtaatctaagcactttgggaggctgaggtgggtggatcacctgaggtcaggagttcgagaccagcctggccaacatgatgaaaccttgtctctactaaaaatacaaacaaattagccgggtgtggtggtggacacctgtcatcccagctacttgggaggctgaggcaggagaatcgcttgaacccaggaggtggaggttgtagtgagctaagaccgtgccattgccctccagcctgagcaacaaaaatgaaactccatctcaataataataataataataataaaacaaaaaaaaaagtacacagtacgtgagcgggtgataaaagacaggaccttcccgtgatcactagatgtgtagacatgaaagatctgcttcccagacctggggctggagaaggtcttggtaagggagtggtggcctcatgtcttcatgtctgccctgagagaggctgtttggatgttgctgtgcttgcagggcctccatgctgagttttgtctctgttcagctgggaacatgcaggtgaccttgccaggcaggcatcttctcactttctccagggcgaagagatgagggcagggaggtgacaggacagatcactaggggtggctgtcatgagaactttaggctggagtgcagtggtgcaatcaaggctcactgcagcctctacctcctgggctcaagtgatcctcccacctcagcctcccgagtagctgggactacaggcacatgccaccatgcctggctagtttttggtattttttgtagagatggggtcttgccatgttgcccaggctggtctcaaactcctaggttcaagcgatcctcctgcctcagtctcccaaagtgctgggattccaggcatgagccaccgcacctggccctgttgtgagaacttctgactctttcctggagtggggtgcagccagggcagggctctgagcctacagggccctgacctgactcaggtggtctcaggcttcctctggctccacaagaggagcagacagcagggagcagacagaagggagcaggctgtggggtgtccaggtgggaaaggatggaggctgtggcagggtggggacagtggaggggaagagtttagtttctgtaggtggagccaataatatctgctgacaggttggagtgggtgtgaaggagagaggtgaaggaccaccccggagtgtttggcctcagtcactggaaggacagagctgccactgacctaggtggggaaggtagtgagggagcaggttctggaggaaggtcagaagctcagtttaggatatgtaaagcttaaaatgcctctaagggccaggtgcattggctcacacctgcaatcccagcactttgggaggctgaggcgggtggatcacgaggtcaagggattgggaccatcctggccaacatggtgaaaccccgtctctactaaaaaatacaaaaattagctgggcatggttgcgcatgcctgtagtcccagctactcgggaggctgaggcaggagaactgcttgaacctcagaggtggaggatgcagtgagccgagatcgcgccactgcactccagcctggtgacagagcaagactccgtctcaaaaaaagaaaagaaaaagaaaaaggaaaaaaaaagcctctgagatcttccatcctttcccatggaaatggtgaatatgatgcaggatgtaggagcctggagttcgcaggaggtgtctgggctggagatagaaatttgggggttagggttagggccaggtgcagtggctcacgcctgtaatcctagcactttgggaggctgaggtgggaggatcacttgagctcagagttcaagaccagcctgggcaacacagtaagacctcatctctacaaataattaaaaaagaaaaaagataaaggaaatttggatgtttgccgggcgtggtagcttgtgcctgtagcagtagctattcaggaggttgaggcaggaggaggattccttgaggccgggagttacaggctgcagtgagctacatcacatcactgcattccagtctgggtgacagaacccctgtctctaagaacaacacaaaaaactgggcgttggccgggtgctgtggctcatgcctgtaatcccagcactttgggaggccaaggcgggtggatcacaaggtcaggagatcgagaacatcctggttaacacggtgaaaccccgtctctactaaaaatacaaaaaattagccagcgtggtggcaggtgcctgtagtcccagctactctggaggctgaggcaggagaatggcgtgaacccgggaggcggagcttgcagcgagcagagatcgcgccactgcactccagcctgggcgacagagtgagactccatctcgaaagcaaaacaaaacaaaaaactgggcgttgatagcctagagacaggatttaagctgtgcatgtaggggaggcaccccatggcatgagtggtacagagaggaggatagagacctaacacctggggctgccgggaataaggggttgggggccagaactagatgacaatatggttacgattggcagtgagtgccatgagaaagtacaagtcattttgaaagcatataactggaagcctcacctagtctcaggttgggtggagacagggaggtctttctggaagagatgactcctgaggtgacacctgcagcctgagtagctacacaatcaggccagaaaaaaaaaggcagcaggggagttcctggccgagggcatgagggctggcagcaagtgagcctcgggagagggcagagagctggagcagtcagtctggcagggaggggtgtggtgagaagggaatctggattagtcatcaccaaaagatctgtgccaagcccgggttcagatctggttctgccaccctccgtgaccctgcctttcagaatctccattctctctcctgccctgcagacaaggcttgtgtagcagttaccttggcctggccccagcaaggcctcaggaaacatcagctgcaactagttttgtctgttgtgatgttgttatttgacctattatattaattatattattaacgcataagggtagtggttaaggatacaggctagggagagtgactgcttgggtttaacctcagagtcggtttacttatctgtaaaatggggataataaatagcatctatgtcacagggctgttaggagaacaagggaactgatggacgtcaagcacttggaggagtggttgatggttacttgtttttgtatcttttttttttttttgagacagtttcgctcttgttgcccaagctagagtgcaatggcacgatctcgagtcactgcaacctctgcctcccgggttcaagcgattctcctgcctcagcctcccgagtagctgggattacaggcacacgccaccacgcctggctgattttttgtatttttagtagaaacaggatttcaccat[137 bp omitted]tgaggaatacagctggcctcgaggctgagggaacagcatgagcacagacacagagctaatgggggcatttacaaagcatttatcaccaatttatttatttatttattggagacggagtttcactcttgttgcccaggctggagtgcaatggtgcaatcttggctcactgaaacctctgcctactgggttcaagcgattctcctgtctcagcctcccgagtagctgggattacaggtatgcaccaccacatccggctaattttgtattttttagtagagacagggtttctccatgttagtcagactggtctcgaactcccgacctcaggtgatctgcccgcctcagcatcccaaagtcctggggttattggcatgagccactgtgcccagtatttatttgagacagagtctcgctctgtcacccagattgtagtgcagtggcatgatctcggctcactgcaacccccgcctcctgggctctggtgatccccccacctcagtctctagagtagctgggactaggcgcatgccaccacattcagctaatttctgtattatttgtagagacaaggtctcactatattgcccaggctggagtcaaactcctgggctcaagagatcctcctgcctcagcctcccaaaatgcagggaatacaggcatgaaccacttcacccagccaccacttaagttttttttttaataatcagtattgctgcagatatcatttaattttgatagggggcctagtggtatggagcaacccatgttcccattttacagatgagaaaatcgctgctcaggaatatcaagccactcttttggggttgtgcagttattacagggcacagccaggattcaactcaagcctagccagcctgcagggtaggggataagagccagccagcctgcctgggggccagatttagctccccccgatgagtcctgaaaaagtactggactcccgtggctcatgcctgtaatcctagcactttggcaggccgaggcaggtggatcacctaagatcaggagtttgagaccagcctggccaacatggtgaaaccccgtctctactaaaaatacaaaaattagctgggtgtggtggtgcatgcctgtaatcccagctactcgggaggctgaggcaggagaatcgcttgaacctgggaggcagagactgcagtgagctgagatggcgccactgcaccccagcctgggcaacagagcaagacgctgtctcaaaacaaaaaaaaaaaaaaagaaaagaaaagaaaagaaaccaggctatgtaaaaatattattgtaaaaaattaaattaaatcaaaaaaaggccggtagcccatacctgtaatcccagtacctcacagtactttgggaggctgaggcaggaggacggcttgaggcccggagttcaagagcagcctgggcaacatagcgagacctccgtctctattatgtaaaaacaataatattttttaagtaaataaagaaaccaggccgtggccaaaggaatcttcctgtgtctggggccttctttagaggctagcatactgaggacactctttgggccagtccaggaaggaatgattctggtggcccctgactggggcgggggcgtggtaaggttcgcctgggaggcggcgcaggcgctgcctgcggtttgactgccatccgggctgctgcaggcactgggaaaggcaatccagcctcaatcctcgccacagacacgggcgactgtcccccagcgtgtgagtcaaaccatactccaggcctccaggaggtgtttgtcgcgacaacacctgcagagggcccgtgcggagtcccttagtgagcggaccgaaaaccgccaccctggaaggatattggcatgccctagggtgaaaattcacactacgacactcggggggtgggtcccctccgagttctcgtccgcgggtgcctccacccagacctgaggggtgtcgggaagacccccgcctaccgagtcagggcgggattaagacctccggcgctggaaacgcgtagggcggggcccagacctggatccagctagccgggcggtgtggggtgcgcatgcgcaatgtccgcttcggctctaggaccgcgcgggcgacagcagggccgcggtgcagtgtccgacccgagagttgcggcctgagtcaccggccccgccctccggagccggacgctgcgggaggcccgggagcggcagtggaaccgactcccagaactccggacgtgtgcggcggtaagcgcccggcccgtaccccctccgcaccccgcaactccgactttggcggcccccagacccggcgaaaccgtgaagtctcggcctcaggagccccccagatccatggtctcagattcgaaccctcagacctgttcgatctccttttatgccgtcccggggacccttctccaccctctgtctcatgatccaaaatacaggcccataggtttcagagataccctgtgaattcttccttggggtgtcctgaaccgcgatcgtagatctgtgcccccagttccagcggggaaccccattgtccgggaacccagagctcacagccacgatcttagacccgagcccacagagccagaggtgacactggaatcctgccgctgggaatacctaaattctcaagcccacatttgggatttcctaaaccccgccctggggccctttaggccgtggatgtttgctccgcgcccatgacctgccaaggacctctacattcaggctgggctctggatctcacattctagcgcccagacatgtcgggaacgccttacgccaacttggggtccccaccaagagaacccccaccagatctgcaccctccccttcacgcgtgcacccagtccaggctccctcaagccccacgggtgccttttagacctgaggaggttgcaaacctgatcccccatacctgccccacccatccgcggacaacccgccctcgcaaactcagacccccacccggaggcttcagattcctcccaggtccagctgccggaaatgcgtgtttgaagggagggtgtgggctcaggggcgaagcacccactggtccccttttttccccccagcagtgagtcgcagccatgttcctggttaactcgttcttgaagggcggcggcggcggcggcgggggaggcgggggcctgggtgggggcctgggaaatgtgcttggaggcctgatcagcggggccgggggcggcggcggcggcggcggcggcggcggcggtggtggaggcggcggtggcggtggaacggccatgcgcatcctaggcggagtcatcagcgccatcaggtaaggcggagactatcagaggggcggggcctgggaatgggaggagcctcagtgaggcgtggtctgggaggggcgtggtctaaaaatagaataggattaacctggaggctaacctgggtacatgaattaggccggggaggcctggtttgagagttctgctgtaagggggtggaccccagtgaggcggatatcagtcattgggggcggtgcttgatatgggagtagtctgattgtgtgggaccaggacaatgtggtcctgaggggactgatgtggagttttggcgggtggggcttatgggtctgggctcagcctgcattggctaacctggagatgaacgttaaaggtgcggagccaatgcgtctgagtgacattttacggaaggggcttgacttatgagtgtggtcagaggttttaggtgggttaatgaggaggtgagcccaggaggaagcaagacctaatggggtagggtaaatggcccagaatgggctgggcttgctgggaactggctggattaatggagaaaaatgccctggtagggatagggcaggttggcttaattagccacggccacttagcagtgatcccttgaaggggcggggaccaatggctggggtaggatgttgggaagacgggcatttaggaagcgggccatggagtagggtcttgggcagatggcacctgaggaggataaggccttgggaagctggggcagagcctctatgaagtgagccctccaaggggcggggtcttttgattctacgtgggattttttaggtttagggtggccaagatgactgaaatctgccactgggtaggtgtgcctggcaggaggggagcctcccaggggaccggtctctgggtttcctcgagggtggggttggcctgaggaagggagaagaggggcacgaccagggcagtgtggattgggacagatgaggacaagaacaaatgaaaggcacagcaaccaagtaaggaagataacggctggggtctggagcgttggggctgatggttctgtagtgctgcccgttggaggccccgcccctggcactaacccctcccccttatctcttcgcagcgaggcggctgcgcagtacaacccggagcccccggtaagccccctctgcaaccagacccccttctcctgccaaggcctcttcgaggtcccatccctgttcctgtagagaagccccaccttcctccccttcttgtgaaattcctctgccagttcctcccatgccgtgtctgcagcttcgccatgggtcttagccatgccccacatacgtgcaccccattcactaccacccctcattcttttcctcatcaagctgcccagcccactctgacttccccacccagggtacctgggtttggggagccgtcctggccgggttcccctccccctgctctgagctctcctccctttgcagcccccacgcacacattactccaacattgaggccaacgagagtgaggaggtccggcagttccggagactctttgcccagctggctggagatgtaagtaacctggggtccctggccccgtcctaaccgttccatcccttcccttgtggctgcccttgcacacacacccttgaccatgacaatcccagtgttcccattctccatgacattctcagacccctttcagtcacccctgacctgcccctaacttccgcccgcaggacatggaggtcagcgccacagaactcatgaacattctcaataaggttgtgacacgacgtaagtgaccggggttaaggaatagggtagattcagaggcagaggggtcagagaggatttgacctctggcctctgactttcaacctgttacccacagaccctgatctgaagactgatggttttggcattgacacatgtcgcagcatggtggccgtgatggatgtatccttgggggcagtgtgggagaggccctgggtggacagagagttttttgagagtatgtttgggaagccaacatgtagctttcatatccacagatgtggaaatgcattcatcagaacacagtcacctgcagacatgtggcggtaaatcataacaatgccagctgtcacagctggcactttaattatataaagtgaccgaaccgtcataaccaccctgttggacaggcacaattattatattccattttacagaagaggaaactgaggctcagtttcctgaaagaagcagtcatttgtctcaagttatagataaaggtcaggcatggtggctcatgcctgtaatcccaacactttgggaggctaaggtgggcagatcacctgaggtcaggagtttgagaccagcctggccaacatggtgaaaccccatctctattaaaaatacaaaaattggccaggcacggtggctcacacctgtaatcccagcactttgggaggccgaggcgggcggatcacgagatcaggagattgagaccatcctggctaacacagtgaaaccctgtctctaccaaaaaaaaaaaaaaaattagccgggcgtagtggcgggcgcctgtagtcccagctattcgggaggctgaagcaggagaatggcgtgaacccgagaggaggagcttgcagtgagccgagatcgcgccactgcactccagcctgggcgacagagccagac[136 bp omitted]cggtgaaaccctgtctctactaaaaatacaaaaaaattagccgggtgcagtggtgagcgcctgtagtcccagctactcgggaggctgaggcaggagaatggcgtgaacctgggaggcggagctttgcagtgagccgagatcgcgccactgcactccagcctaggcgacagagagagactccgtctcaaaaaaaaaaaaaaagaaaaaaaaagaaaaataacaataacaaaaattagctgggcgtggtggtgcacgcctgtagtcccagctactcgggagtcccagctactcaagcaggagaattgcttgaacccgggaggcggaggttgcagtgagcagaggtttcgtcactgcactccagtctgtggactcaggtcttttgggcttgagaacccacgtttataacagccacatgcgcatatacacacacacacacctaagagcacacccacatacgtgaaggtgtatgaggcagtgtgcacagggacacacgtgttatctgtacatgggccagccattagctgatcttggatacatgcatatttttatttatttttgttttaaaaaatattttatagagaaaagctttcactatattgacctggcaagtctcaaactccagaccttaagcaatccttccgccttggcctcccaaagtgttgggattacaagcttgagacactgcgcctggcctcatgcacatttaacacatagggcaaacagacacatacataatatacatgtcatgtaatcacagacatattgcatagagcaaagcaatcccaactctacctcttaaccaggttattgaaccgctctgtgcctcagtttctctctctgtaaaatgggtgagtgataatggtgataccgaatcggaactacatccaaaaggtttagcacagtgtatagcgcatagtatgtggtctgtacacattagctcttaactatgatcttgggtagagttttcagctttgaatgttttcttctctggaaatagtcctggtagaactggtgtcccaaggatttagtgagaaagtgatgttcctgagtggacatcaggtggatcctgagttcaagcgatccacctgccttggcttcccaaagtgctgggattacaggcatgaaccaccatgcctggtcacacacttgtttttcacatatcctaacatttttatgaaattgagttactgtcaagaattttcttttctttctctttttttttttttttttttgagacagagtctcactctgtttcccaggctgaagtgcggtggtgccatcttggctcactgctaactccacctcctaggttcaagcagttctcctccctcagcctcctgaatagctgggattacaggtgtgcgctactacagctggccaatttttgtatttttagtagagacgggatttcatcatgttggccaggctggtctcgaactcctgacctcaagtgaaccgcctgcttcggcctcccaaagtgctggattgcaggcgggagccaccgtgcgtggcctattaagaattttctgaatgagcaattaacaactcttcaggcaaggaatttgtactttagagtagttgaatataattcctcatggttatgtttaaagagaatccctatttagaaatgtaagtgacaatatgtatggataaaatgaaaaataaaaccgcacaccaggtgatatgactaggaccaagcgggagctggagtttcagccctggctgccctgcttgctgtatcaccatcgtgtccacagtgcatgtgatgcatgcatctgggtgtagctgtcactcttcttaacaccctcccaccagagcgacaccacaggcaagctgggctttgaggaattcaagtacttgtggaacaacatcaaaaggtggcaggtgtgtagaaacctctgaaatccctggcacccagacccccaagccatggagacactatgccccacaatgctcacttggacccaatgtctctgtcctcacaggccatatacaaacagttcgacactgaccgatcagggaccatttgcagtagtgaactcccaggtgcctttgaggcagcaggtatggctggcagggacatgctggggctgggagtgggatgggtgagaaaacctctactcagctggtctgggcctgactcctgggcatgggagtgggttgggccatgtggcccccgcacctgaaggactacatccatcttagggttccacctgaatgagcatctctataacatgatcatccgacgctactcagatgaaagtgggaacatggattttgacaacttcatcagctgcttggtcaggctggacgccatgttccgtgagtgacaacccagctgtcttcctgggtggggattcctatgacctctatggaccaaggtctcctctaagcctgactttgaggtgggcgatgctaggggcacagtggtgattgaatcagttccagtttctgccctcatggagctcacagtctggtggaggagacacaagtccccagacagtgacagttcagactggtgatggctgggagaggggaagctcagggcagagtgatgggttgtgatgggggcagcacaggccgagggtctagggctctggtgaggggaagagtgagcagagcgtgctcagattgtgcttggggaagcctagagggcaaatccaatccaggaggaacctgatgcagcccaaggggtcagggagggctcactggagagggaacattgagacctgaggggatgaggagagaacttagtgagaaggtagggaatactgttgcaggctgagggaacagcctgtgcaaaggcctagaagggaaagaagatggggcttctgatgctttttgttagatttctttctttctatttttttgagacagagtctgctgctcttgttgcccaggctggagtgcagtggcatgatcatggctgactgcagcctcaactcctaggctccagcagtcctcctgcctcagcttaccgaatacctgggagtacaggcacacaccgccatgcctggctaatttttaaaattttttgtagagacagggtcttgctatgttgcccaggctggtcttgaactcctgggctccagcaatcctcctacctcagcctcccaaagctttggtgttacaggcatgagccattgcatgtggccttctgagtgttagtgtactgaatgctgaagacatggctgggaagtggggattactgtccttattttgtgaaggaggaacttaggattcaaggaggcaaattttcatgctcatagtcacccagctaggaagttgtaaagccagaatttgaacttggatctatctgagatctgagctaagtaagagaaggtaggagcagtgagcatgattaggtcatgcaggattgtgggtgccaagtttgggggtgctcaaactctaccagagacattggggagccatggcaggttctaggcagaggga[138 bp omitted]cagtgaaaccccatctctactaaaaatacaaaaaattagccaggtgtggtggcgggcgcctgtagtcccagctacttgggaggctgaggcgggagaatggcatgaacccaggaggcggagcttgcagtgagctgagatctgccactgcactccagcctgggtgacagatcgagactccgtcttaaaaaaaaaaaatcccttggcctccaggccgggtgcagtggcttatgcctgtaatcccagcactctgggaggctgaggtgggcgtaaaacctgaggtcaggagttcaagaccagcctggccaacatggcgaaaccccgcatctactaacgatacaaaagttagccaggcgtgggggcgtgtctgtagtcccagctactcaggaggtttagggagggagaattgcttgaacccaggaagcggaggttgcagtgagcagaggtcatgccattgcactccagcctccaacctgggtgacaagagcgagattccatctcaaaaaaaaaaaaagaaaaaaagatcccttggcctccagagagcccacaatgcatgaaaagtaacagaggaaaagaagcaggtatgtgagatagcagggaggtgaagggagtggacagacaaggttgatgccacaagtcacataagaggggccaggaaatagccactggatctaccagcaagaaggctgatagtcgggaggatcatttgagtccaggagtttgagaccagcctgggcaatgtagtaggactccatctctacaaaaaaaaaaaaatatatgtatatagacatagccgggcatggtggcacatgcctgtggtctcagttgctcgggaggctgaggtaggagaatcacttgagcccgggagggtgaggctgcagtgagctatgatcttgccactggactccagcctgggccacagagacaccgtctaaaaaaaaaaaaaaaagggctgggcatggtggctcactcctgtaatcccagcactttgggaggccgaggtgggcggatcacctgatgtcaggagtttgagaccagcctggccaacatagtgaaaccccgtctctactaaaaatacaaaaaaattagccaggcgtggtggtgcacgcctgtagtcccagctactcaggaggctgaggcaggagaatcacttgaacctgggaggcaaaggttgcagtgagccaagatcgtgccactgcactccagcctgggcaacagagtgggactctgtctcaaaaaaaaaaagaaagaaaggcagccagggtgtgcaggacgctgtgggtatggacacctgagggtggtggtaactgagcggagatagtgtagtcatcatgtctagattccctgtgggtggggaacatggagtcaagtttcagggcaggcgtggggacctacctgtaagactctaggggcaggaagtagagtgtgcagagcctccctctagtagcctgttaggcttagaactggagaggatggagcatagatgtcagtaggaggctggggctgggcagaggtgatatcagtacacagaggccattattgaggagggtaacagattggattccaatcctgatttcttcactttcttgctatgtgacctggggcatggcccctcccttcctgcctcatttctttttttcctgtttttaatttttagtttttttaaaaagcagagatgaggtctctgttgcccaggttggtctcgaactcctgggcggctcaagtgatcctcccatcttggccttccaaagtgttgggattataggtgtgagccaccacgcccagcctgtgcctcattttaaaatgacacttatctcacagagttggattaaatcagccaatacctggaaagcactttaccccatgcttggcacacagtaaatactcagtgaagtgccagctgctatgattgtcatcccatgtatttgtgtaatgttattatgccaaaaaccagtctccttccttccctgccgccaaacctctgcatctcctcctccaggtgccttcaaatctcttgacaaagatggcactggacaaatccaggtgaacatccaggaggtaaggacccccatattggggtatgggtgcctgggaggaccccacccctcagcccttcataccagctctgagctgcagtccccttcctcctattttgccagccgtccctgggtgagggcaaaggggctggtgctcttggggttccctgtcctcactctccaccctcctctccccagtggctgcagctgactatgtattcctgaactggagccccagacccgccccctcactgccttgctataggagtcacctggagcctcggtctctcccagggccgatcctgtctgcagtcacatctttgtggggcctgctgacccacaagcttttgttctctcagtacttgttacccagcttctcaacatccagggcccaatttgccctgcctggagttccccctggctctaggacactctaacaagctctgtccacgggtctccccattcccaccaggccctgcacacacccactccgtaacctctcccctgtacctgtgccaagcctagcacttgtgatgcctccatgccccgagggccctctctcagttctgggaggatgactccagtccctgcacgccctggcacacccttcacggttgctacccaggcggccaagctccagaccgtgccagacccaggtgccccagtgcctttgtctatattctgctcccagcctgccaggcccaggaggaaataaacatgccccagttgctgatctctatgggatctgcctcctgatctgacccgagagaggaggggtggctcgggctctgggtcctggggagcaggggaggtagtagattcgtccccagggctggatccgtggatttcctcgtctttttctcgtcggcattttttgtctcatcctgagctgtggaggctgagacaggacccagaagccccagtgatctctgcttctgcttccagagtctgggctggagggaggtctcaatgccactcctggccctgtcccccaaggccatgtttgcccctcttgcagcttctccatccacacttggcctctgcctctgttgtgtcatggaccatgctcagtgtcttccttcccacttgaggacaccaccccacgtccccgggtcccgagggggagcctatgggtgctgtttggggtactcagcagagggctgagaggtagcaacatcctaggagtatccctggtccagcatgaggcaccgagggctgggggcagtgggcagtccacagggcagagatccctggctggtgggaggatgggcttggtggggaggggtggacacaaacacagacacacacagaggccagcgtttattgacacttgttcaagtctctcaggccccccaggcttcttggtcttaattcctggggaaggaggcccagccaagggagtacaagctgtagacagtgcctagaaaggggaagcgttggagacagaatgagacctaatcccctccctggacatcccaggcttttaaggccttcaggctccctggttcccagcctggaccccagctctagttcggactccagctcccttcccagattggactcctattgtaaagccccctggctttgatctagaccgggctgggagctttctccccgactcctccctgggcctcagccccaccactaacccagcccccgtcctgggacaagagcccaaaccctagttactcccctccctgcaggcctgactccagctcagtactcgacccccttcctaaacgccaacccccaacccagatcctggtcagtcctgcccagaaaccagccacctcttactctgggtccagccccgcctcccccgcagcccagacgggccctgcgctcaccgcccagacacagcgtcattgtcactcggtacaggatgttgtcaacgatgccgcccttcaggtacaacgggatgtcattgtcctcctggatgtgggggtgtctgatgagaaaggggtgctggctgctccttagagcgcgccccgcctgccccggctcggcgcgctcccggctggcgcgtcggatccccaccccccccgaccccccacctggaagagcttctgtttctcgcgcactcggttctgaaagcggttccgggcggtggagctgaaggagcggatcagcgcctgggacacctgcggggtgggaggtgggcgggtattggaggcacctggaggggtgtcctgaagtgggaccccgctctctgaggcctggacgtggggacagccccatccctagcgagcgtcccaaaggcgaggagggtaatagcttggattctgttacccgcgaactgccagctgggttgggaggggactcgccctggagtctggcctgggggtgaccgggctgcctagagggtcctggaagggagaggacccagaaggactttgttctggggggcctaagtcctgagatttttgttgggggagggtttcctggattaaagggaggaaaccaggtcccgggaacgtggggaccggaatggaggtccccgggagcgtccaggctgcctgagaaggcccgggtgaggccagtgttaagggttcccgagatgtcaagttcaaacccggggctttgggccggggtgggggtccccagttgtctccgaagagtggattgtgggggaagggacccaggctgtttagcggggagtcccaggccctgaaggtggctcacgttccaaggccctagatgcgggggcacttggagagtcgcgtattagggcggggttttctgggtggggggctccggcccagcccatgggggcctcacccgaagggcctgcattctgccttgtcctcttccgccggagtcacctcccttctccgcccaaggacacgcgtagtcctcctctgtccaggaaccccaggccccacccgctgcgcgcagcgtgacagctggggacgcggcggggctggggctggggctggggctgggttgcggggagtcctgctcctcggattcgtccaccacggaggaggcggtccagacccgcaccctgggccgcagcgcgcatccgtttcggtctcggaatttcgcttggtcccaccggagcccaaagcggtaccagggaatacatttttgcagatttttggagatttccgccgggggcaagtgcaactcctccccggatctctccctgcccgctggtatgtgagagtgaggaaacgcataaggccgtgttccaactccctgttctgtctacacagccagagattgcacctccgagcctgtttccgtatctgtaacgtgagggctaaggcaggatctttctcagagatttgttgagacattaaatgaccttgtttttaggaaacacaagctaaagtctttgggagtaaaacggtattttatgttaccctaagaaacacatcatatctatttatagctctctaattctggcagtcaacggggtgcagcacagttgtcctaatggttttagcaaccaggaaagatcctggcctagtctacaaggttttctttttcttttcttttttttcttttttttttagacagggttttgctctgttgcacaggctggagtgcagtggtgcggtcatagctcactgcagcctcgacctcctgggttcagcgatcctcctgcctcagcctcctgagtggctgggactacaggcgcccaccaccatgctcgaactaattttcgtattttttgtagaggctgggtttcaccatgttgcccaggctggtgtcgaactcctgagctcaagaaatttgccggcctcatcgtgagccacgcacccagccagcagacaatgtttgtttgtttgtttttgaggcagtgtcttgctatgttgcccagggtggtctccaactcctccaagtaatgttcctacctctatcacccaaagtgctagaattagaggcatgagccactatacccagcttgtaaaaggttttaacaatctcttttatttatttatttaatttatatttttagacagagtcttgctctgttgtacacgttggagtgcagtggtgtgatctcggctcactgaaaccttctgcctcctgggtttaggcaattcttgtacctcagcctcctgagcagctgggattacaggcacccgccaccacacccagctcatttttgtattttttagtagagatggggttacaccatgttggccaggctggtctcaagctcccaacctcaggtgatccgcccactttggccttccaaagtgctggaattacaggcctgagccaccgcttccagccacggtctcttttaaagagggcttttatgattattaaattcccctaacactttcaaactatgcttgtaaatttaatgttaggtttttccatttaagagccacaagtagggctgggcgtggtggctcacacctgtaatcccggcactttgggaggccaaggcaggtggatcacttgaggctgggagtttgagaccagcctggtcaacatgacaaaaccctgtctctactaaaaatactaaaattaaccaggtgtggtcatgggcgcctacaatcccagctgcttgtgaggctgaggcacaaaaatcgtttgaacccaagaggcacggaggctgcagtgagccaagattgcaccactgcactccagcttgggtgacagaacgagattctgtctcagaaaaaaaaaaaaaaaaaagctgacttaccagataaacagatgactctttcttcaattcttaaataacttttatgaataaaaaattcataaactgtacataaacagatttcaagtaagtcttagtcaccagctgaattccacattttacaatggaattacaagattgacctgttatttgaataggccagtttaccttaaatattacaaattcttaaaataccaagtattcacagattctctaacacaaagttaataccatgggggccaggcactgtggctcacgccagtaattccaacactttgggaggccgaggtgggtggatcacctgggtcaggagttcgagaccagcctggccagcatggtgaaaccccgtctctactaaaaatacaaaaattagccaggcgtggtggtgggtgcctgtaatcccagatactccggaggctgaggcaggagaatcacttgaacctgggaggcggaggttgcactgagcagagattacgccattacactccagcccgggcaagagagcgagactccatctcaaaacaaaacaaaacaaacaagttaatactatggttttgactgtcttaattttcttttttcttttttgagacggagtcttgctcagtcacccaggctggagtgcagtggcgccatctcggctcactgcaagctccgcctcccaggttcacgccattctcctgcctcaggctccccagtagctgggactacaggcgcccgccaccacgtccagctaagttttttttttgtatttttagtagagacagggtttcaccg[137 bp omitted]caggctggagtgcaatggcgcaatctctgctcactgcagtctccgcctcccgggttcaagtgattcccctgcctcagcctcccaagtagctgggactaggtgcacgacaccacgcctggctaattttttgtattttagtagagacgaggtttcaccatg[131 bp omitted]atgcgcgtccgtgtgaagagaccaccaaacaggctttgtgtgagcaacatggctgtttatttcacctgggtgcaggcgggctgagtcagaaaagagagtcagcgaagggagatagggatggggccattttataggatttgggaaggtaatggaaaattactgtcaaagggggttgtgctctggtgggcaggggcgaaggggtcacaaagtgctcagtgggggagcttctgagccaggagaaggaaattcacagggttaatcactcagttaaggtggggcaggaacaaatcacaatggtggaatgtcatcagttaatgcggggcagggccttttcacttttgtgattcttcagttacttcaggccatctgggtgtatacgtgcaagtcacaggagatgcgatggcttggcttgggctcagaggcctgacattcctgccttatgttaataagaaaaataaaatagtgtcgaagtgttggggtggcgaaaatttttggggggtggtatgaagagagaatgggcgatgtttctcagggctgcttcaagcgggattaggggcggcgtgggaacctagagtgggagagattaagctgaagggagatcttgtggaaaggggtgatattgtggggatgttagaagaaacatttgtcgtatagaatgattggtgatcgcctggatacggttttgtatgaattgaaaaactaaatggaataagaaaaggagcaaaacaggtataaaaggactaagaattgggaggacctaggacatctgattagagagtgcctaaggagattcagcatagtcctgccagcaaagattatttatttacttcaagagttaagagtggcagtttggggatagcatgaggagatatcagctgtgatggcttggagaaactgtgtaaactggcagtgtaaacaagagcagggcatgtatgagtagttgagaacggtgaataggagtatgactagacagaagatagtagggatgacaagttattcgggggcacagtctaagttggtctggtgtctggaatgagactggggcctaataaaaaggagcgtctatacaggagcttaaatgggctgtagcttgtagcattctgaggacaggtctgacttctgagaagggaaagtggtaaaagtattgtccagtcctttttaagttggtggctgagcttggtgaggtgtgtttttaatagaccattagtctgtcactgaatactaagagctggaaaaaatgcttggctgatttgactaataaaggctagtctgttaccagactgtatagaggtgggaaggctaaactgaggaattatgtctgacagaagggaagaaatgactgtggtggccttctcagaccctgtaggaaaggcctctccctatctagtgaaagtgtctacttagactaagaggtattttagtttttgtgactcggggcatgttgagtaaagctaatttgccagtcctgggctggggcaaatgctcaagcttgatgtgtagggaagggagggggcctgaataatccttgaggagtagtagaataacagatggaacactgagaagttatttccttgaggatagatttctacaatggaaaggaaatgaaaggttctaagaggcgggctagtggcttgtactatagcatagcctgcctttgctggtgtgtggcgattaggcctggtggaactgccatcaataaatcaagcgtgatcagggtgaggaacagggaagaaggaaatgtggggaaatgggatgaacatcaggtggatcacagagatgcagtcatgggggtcaggtgtggtatccggaataatgtgggaggctggattgaagtccgggccaggaacaatggtaattgtgggacttaacaaaaagtgagaacagctgaaggagtcagggagcagaaagtatatgcgtcaggtgtgaggaagaaaatagattttggaagttatgagaaatgtagagagtgagttgagcatagtttgtgattttgagggcctctaatagtattaaagcagtggcagccgctacacgcagacatgagggctaggctaaaacagtaaggtcaagttgtttgcacagaaaggctacagggtgcggtcctggctcttgtgtaagaattctgaccgcactaaccatgcctaggaagggaaggagttgttgttttgtaagggatcgaggtttgggagattaatcggacacgaacagcagggagagcacatgtgtttttacgagaattatgccgagataggtaacagatgaggatgaaatttgggcttgactgaagtaatggggtctgtctgtgaagccttgcggcagtacagcccaggtaatttgctgagcctgatgggtgtcagggtcagtccaagtgaaagggaagagaggctgggaagatgggtgcaaaggaataggaaagaaagcatgtttgagatccagaacagaataatggattgtggagggaggtattgaggataggagagtatatgggtttggcaccatggggtggataggcaaaacaatttggttaataaggcatagatcctgaactaacctgtaaggcttttccagtttttggacaggtaaaatgggggaattgtaaggagagtttataggctttaaaaggccatgctgtagcaggcgagtgataacaggctttaatcctttcaaagcatgctgtgggatgggatgttggcactgagccgggtaagggtgattagcttttaatgagatggtaaggggtgcatgatcggtcaccaaggagggagtagaggtatcttatacttgtgggttaaggtggggggatacaagaggaggatgcaaaggaggctttggattgggaagaagggcggcaatgagatgcagctgtagtccaggaatagtcagggaagcagataatttggttaaaatatctcggcctaataagggaactgggcaggtggggataactaaaaatgagtgcataaaagagtattgtctaagttggcaccagagttggggagttttaagaggtttagaagcctggctgtcaatacctacaacagttatggaggcaaaggaaacaggcccttgaaaagaaggtaatgtggagtgggtagcctccgtattgattgagaaggggacggacttaccctccactgtgagagttacctaaagctcggcatctgtgatggtctacggggcttccgaggcaatcgggcagcgtcagtcttcagccgctaagccaagaaggagtcagtcagagagccttgggcaagagttccaggggctctgggagtggctgccaggtgagttgaacagtccgatttccagtggggtcctgcacagatgggacacggcttaggaggaatcctggactgcaggcattccttggcctggtggtcagatttctggcacttgtagcaagctcctgggggaggaggttctggaggaacgcctggccgctgcggttcaggcgtttggaagttcttgtgtgctggagatgtggctggggtttgtctcacagtggaggcaaggaattgcaacttttttttattattgtacaccttaattaagtcctgttttggggtttgagggccagattccaatttttggagttttatttaatgtcgggagcagattggataataaaatgtatattgagaataagatggccttttgaccttttagggtctagggctgtaaagcatctcagggttgctgccgaacaagccatgaactgggctgtgtttttatatttgatgaaaaagagcctaaacgcttctgatttgggataaagaaaaagcattaaccttgactatgcctttggctccagccacctttttaagagtaaattgctgggcaggtgggggagggctagtcacagaacgaaactgtaagctggaccaggtgtgaggaggggaggtgataaaaggattatagggtggaggagcggaggctgaggaagaattgggacctagctcggcccggcgaggaggggagaggtcagatgggtctgtagaaaaggaagattagaaagactcagcaatgcttggggttgggagtgaggggacaggtgggagggaaagaaggaagatttgggacgagttgcactgggcacagagactaggaaaggactgatgtgtaaaagaatgcctggacatcaggcacctcagaccatttgcccattttacgactagaattatttagatcttgtaggatggaaacattgaaagtgccgttttccagctatttggaactactgtggagtttgtattggggtcaagcggcattgcagaagaaaataagacgcttagattttaggtcaggtgagagttgaagaggtttataagttcttaagaatacaggctaagggagaaggaggaggaatggagggtggaaacttgcccatagtgaaggaggcaagcccagagaaaagagtagagacacggagaaggggcgggggtttcttgcccttcagaaaagcagagaaagggttggggcatggaaataagggattgggggttcttgccccctagaaaagtgggacttaccactaacggtgaagaaggggttgaggggttcttgctcctgccccagaagagcagagaaggggtagagacacggagagaaggggttggggtacttgcccctccccgagaaaagcgggacttgccactaagggtgaaggaccaaggcaggtgtccctgcgtggtttgacacctttgaaacgtgggggaataatcagagaggtggccctgcaatgattaaacaccaagggaaggctgccttcccagtccgtgaccggcgccggagttttgggtccacggataaaacgtgtctcctttgtctctaccagaaaatgaaaggaattgaaattaagagaatggagagattgaagtgtggcgccaagattgaaaggagaaagaggttgagggatagggaggttggagaagagagtaaaaagaggccgcttaccggatttgaaattggtgagatgtttcttgggctggtcagtctgaggacctgaggtcataggtggatctttctcacggagcaaagagcaggaggacgggggattgatctcccaagggaggtcccccgatcagagtcacggcaccaaatttcatgcgccacatttcatgcgcgtccatgtgaagagaccaccaaacaggctttgtgtgagcaacatggctgtttatttcacctgggtgcaggcgggctgagtcggaaaagagagtcagcgaagggagataggggtggggccgttttataggatttgggaaggtaatggaaaattacagtcaaagggggttctctggtgggcaggggcagggggtcacaaagtgctcagtgggggagcttctgagccaggagaaggaaattcacagggttaatcactcagttaaggtggggcaggaacaaatcacaatggtggaatgtcatcagttaatgcggggcagggccttttcacttcttttgtgattcgtcagttacttcaggccgtctgggcatatacgagcaagtcacaggggttgcgatggcttggcttgggctcagaggcctgacagtttatttttgcctcttggttcagcgacacaaggacctcaaaatgttcaggtggaagtcttatctcccagttgttggatccattgttgtgtgcccagtggaagcattcctctccatgaggaccaaaatctctaaactagcagagctcaaagctgttgaggagagaagcaattattcaagttactgtgtgtaacagagagaggaaccatttctactcactttccccctgactcccagtcccataaattctcactatggggaaacatggtagagtggtctctcattcaaagcacaggccatgtcctgtaagacaatcccattttttcagggtattgtttcccagttggtactttaatggagtcattgctgactcattctacctttcagttaggccagttgcttctgggtgatggggaagatagtaagattctataagattccatgggcaggagcccattgctgcacttccttcgctttcaaatgaaattttttttttttttttttttagagataaagtacttggtctgtcactcaggctggggtgcagtggcaccatcatagctcactgaagccttgatctcctgggccaaagtgatcctcttacctcagcttcttaagcaactggaactacaggtgggtcccagtatgcttggctaatttttttggtgttcttagtagagacagggtctcac[143 bp omitted]catgatggtgggtgagcatgctttgagtctgcagatggtagtgacagcaaacgcattaaaggcagggaagcacgttcgtgtctgggatatctgtctattccagtgaggacaaatctttgccctcttcatgacggaagaggtccaaggtaatcaacttgccaccgggtagcaggctgatccccagggaatggtgccatattggggctcagtgttggtctctgctattggcagattaggcgctcagcagtaacagtagccaggtcagccatggcaaggggaagctgacgttgctgaacccatgcatagcctccatctctgccaccatggccacttttttcatggacccattgagcaagcattagggtggctgggaaaagagcctgactctcatgc[141 bp omitted]aacacggtgaaaccctgtctctattaaaaatacaaaaaattagccgggcgtggtggtgggcgcctgtagtcccagctactcgggaggctgaggcaggagaatggcgtgaacccaggaggcagagcttgcagtgagccgagattgcgccactgcactccatccggcctgggtgacagagcaagactccgtcttaaaaaaaaaaaaaaaaaaaaaaaagaatttttcggctgggcatggtggctcacacctgtaatcccagcactttgggaggccgaggcaggtagatcatgaggtcaggagatggagactatcctggctaacacagtgaaaccccacctctactgaaaatacaaaaaattagctgggcgtggtggcgggcgcctgtagtcccacctactcaggaggctgaggcaggagaatggcgtgaaccctgggaggtggagcttgcagtgagccgagatggcgccactgcactccagcctgggcaacagagctagactccttctcaaa[131 bp omitted]gaaaccccgtctctactaaaaatacaaaaatttagccgggcatagtggcgggtgcctgtagtcccagctactcgggaggctgaggcaggagaatggcgtgaacccgggaggcggagcttgcagtgagccgagattgcaccactgcactccagcctgggtgacagagccagactctgtctcaaaaaaaaaaaaaaaaaaaaaaaaaaagaaaaatctgtggctgggtgcagtggctcacacctataatcccagcactttgggaggctgaggcaggtggattgcctgaagtcaggagttcaagaccagcctggccaacatggtgaaaccccgtctctactaaaaatacaaaaattagtcgggtgtggtggcgggtgcctgtaatcccagctacttgggaggttgaggcgggagaatcacttcaacccgggaggcagaggttgcagtgagccgagatcgtgccattgtactccaacctgggaaacagagcgagattccatctcaaaaaaaaaaaaaaaaaaaggaattttcacttcagtggctgcccttgggtgggcactcctatgggacacaaatatcttcacagtctgtgcagagactgagaggcccatccatatgcctctccaagcttccttgtcattaatctttcaatcttcttccttccacgtacttgaccatccacccaaaccattagcaactgcccataaattagtatagatctatacttctggccacttctccctccaggcatactggacaactaaatgtgcagcatgaaattctcttttttctttttgaaacagagtctcgctctgtcgcttaggcaggttgcggtggcacaatctcagctcgctgcaacctccacctcccaggttgaagcaattctcccgcctcagcctccgcagtagctgggactacaggtgtgtaccaccacacccgacctacatgaagttctgaccactgccctgtaggttcatccctaagggaggttgtaatgctgccattgtccactttcgagcggtaccagcatgatgtacagactagctgtaagccaggctcaagtttataattattttttttgaaacggagtctcgctttgttgccaggctggagtgcagtggtgcgatctcagctcactgcaccctccaccttctgggttcaagagattctcctgcctcagcctcccgagtagctggtactataggtgcctgccaccatgcccagctaatttttgtatttttagtagagacggggtttcaccatgttggccaggatggtctcaaactcctgacctcgtgatccacctgcctcagcctcccaaagtgttgagattacaggcgtgagccaccacgcccagccaagtttcttcctcatttcactgggcataaggaacatgccagaggaaaagtttggcttgaagtctaggaaccaatgcaacagaggttagtgttgaaggactctgaccttgttaatggtaaagcagcttcaaaagccggcacggtggctcaacgcctgtaatcccagcactttgggaggccgagatgggcagatcacgaggtcaggaaatcgagcccatcctggctaacacggtgaaaccccgtctctactaaaaatacaaaaaattagccgggcgtggtggtgggcacctgtagtcccagctactcgggaggctgaggcaggagaatggtgtgaacccgggaggcgcagcttgcagtgagccgagatcgcgccactgcactccagcctaggggacagagtgagactccgactcaaaaaaaaaaaaatttttggctgggtgtggtggctcactcctgtaatcccagcactttgggaggctgaggcgggcagatcacctgaggtcagcagttcaagaccagcctgaccaacatggtgaaaccccgtctctactaaaaataaaaaattagctgggtgtggtggcgcatgcctgtagtcccagctacttgggaagctgaggcaggagaatctcttgaaaccgggaagcggaggttgcagtgagctgatatcacaccactgcactccagcctgggaggttgcagtgagctgagatcgtgcccctgcactccagcctgggcgacagagtgagacttcgtctcaaaaaaaaaaattttaaaaaagagcagcttctactgcagcctcctcttaccctattgccttctcttgctctggtctccactcaaagcatgcagccttctgggtgattttgcagatgggtcaaaacagcatactcaatgttgcctcccaaataaaaaaacctaccgaccattgtacttctttctttgtggtaggtactgcaacttg[136 bp omitted]atggagaaaccccagtctctactaaaaatacaaaattagcaaggcgtggtggcgcatgcctggaatcccagctactcagccggctgaggcaggagaatcgcttgaacctgggaggtggaggttgcggtgagccgagatggtgccattgcattccagcctgggcaacaagagtgaaattccgtctcaaaaaaaaaagaagaagaaaagaaaaaatatctttctttcttgctgggtgtggtggctcatgcccgaaatcccagcactttgggatgcccaggcaggcggattgcctgagctcaggagttcgagaccagcctgggcaacaaagtgaaaccccttctctactaaaatacaaaaaattagctgggtgtgctgctgtgcgcctgtagtcccagctacttgggaggctgaggcagaattgcttgaaccccagagatggaggttgcagtaagccgagatcatgccactgcactctagcctgggtgacagagcgacactccatctccaaaaaaaaaaaaaaaaaaaaagtagaaaagatatctttatttccctccctccctcctttccctctttccttcctttttgagacagggtctcactttgtcacccagactgaagcgcagtgataaaatcacagctcagcagcttcaacatcctgggctcaagtgatcctccaatctcaacctcctgaatagctgggacaacagttgtggaccaccatgcccggctaattttatagagatgaggtcctactctattgtccaggctggtctctaactcctgggctcaaacaatcctcccgcctgagcctctgaagggctgagattataggcatgagccactgtgcctggcctgaagataattttagatccttatcagactggagatggtaccagaggaatctacattaacgagttttcttttttttttgttgagacagagtctcactccgttgcccaggctggagtgcagtggtgtaatctcggctcactgcaaccttcgcctcccgggttcaagcgattctcctccttcagcctcgtgagtagctgggattacaggcgccaccaccgtgctcagctttttttgttttgctttgttttttttgtatttttagtagggacgggtttcaccatg[134 bp omitted]ggcttctcacaagttactaccccttttcctttgttctataatttctctaaaaattttatgctttttgttgaagacgctgtataagctggaattcgaagccacctctttgagaactactcattccctgggtgtctcccatgtgtataagaaatatacatgttaataagcttctgtttgtttttctcttattatcttttgttacaggggtacattccaactaggaacttatgaggattaaagaaaaaatatttttcaggccaggcaccatggctcatgcctgtaatcccagcactttgggaggccgaggcaggtggattacctggggtcaggagttcaagaccagcctggataacatggcgaaatcccgtctctactaaaaatacaaaaattagctgggtgtggtggcatacacctgtagtcccactacttgggaggctgaggcaggagaatcacttgaacccaggagacggaggttgcagtgagccgagatcgcgccacttcactccagcctgggcaacagagtgagactctatctcaaaaaaaaaaaaaaaaaaaaagccaggcatggtggcttacacctgtaatcccagcactttgggaggccgaggcgggcatattacaagctcaggatttcgagacccgcctagccagcatggtgaaaccccatctctactaaaactacaaaaaattagatgggcatggtggcacgcgcctgtaatctgagctactcgggagactgaggcaggagacttgcttgaacccgggaggcagaggttgcagtgagccgagattgtgccactgtactccagcctgggcgacagagtgagactctgtctcaaaaatatatatatttttcttcccctgtaaccccccaaaacttcactgaggtgggagggggtcgctgaattttgatggtgactttctccaattttctcattcgtacataccttactaaagcatttaaagtacttgctatttgttgctcgtcaggaccaatcagcataatgtcattcttgtagcagaccgatgtgatggcttgtgaaatgtcaaaatgatcaagatttagtggacaatattggggcaaagagcaggagaactgctgtagcctggaaataccactctcaaggtatactgttgggtctgccaattaaaagcaaactgcttctggtggtccttgaaaattgatatggagaaaaaggcattaggcaggttaatagctgcataccaataccagattctgttgatttgttccagcaagcatattacatctggtacagcagctacaattagaataactatctgattatgtttacaatagcccacagtcattcctcaagttattcttttttgacacgcttatttatttatttattcattttttcaagacacggtcttgccctgccgtccaggctggagtgcagtggtgcaatcttggctcactgcaacctccacctcctgggttcaaatgacccttccacctcagcctcccgagtagctgggatcacaggcatgggccaccacacctggctaacttttgtatttttaaagagatgggatttcgccatgttgcccaggctgatctcgaactcttgagctaaagtgatctgcctacctcagcctcccaaagtgctgggattacaggagagagccaccttgcctggccgtgatgcttattattttaaaccactgttttgggtggcggtgtttttgagacagagtttcgctcttgttgcccaggctggagcgcagtggtgcgatctcagctcactgcaacatccacctcctggattcaagtgattctcctgcctcaggcctctccagtagctgggattacaggtgcctgccaccacgcccggctaattttttgtatttctaatagagacagggtttcctcatgttggccagattggtctcgaactccagacctcgggtgatccacctgcctcggcctcccacagtgcggggattacaggcgtgagccaccgtgccaggcctgtttttgtttgttttttgaaacagtttcattctgtctcccaggcttgagtgcagtggtgcggtcttggctcactgcaacctccacctcccaggttcaagcaattctcctgcctcagcctcccgagcagctgggattacaggcatgtgccaccatgcccagctaatttttgtatttttaatagagatggggtttcactatgttggccatgctagtctcaaattcctggcctccagtgatccaccggccttggcctcccaaagtgctgggaattacaggggtgaggcaccgcacctggccttgggtgttttttaatataacaaaagctaattgacatagggacatgcatttctgcttcaccaaagtccccaccaacccctattgtcttccatctatttcacttactcctatttctggcatggtccttgtaggcatttgagtttgccactcatggatagggcctggcatggcaaactgcctggaccttccgcactgctccctaccatcaccctccaatcccagttcctgggagggaatcccgggtctcattccacccatttctcctccccagcaccttccccagttcctgcccaccatcatcttctcgcttctggctcactgcacccatctcttctctgttctccgtgtatacagctgtaatcattatctagttaattgctccgactctgagagagtaataaaatttctcttatctcaacacaaagtctttggttacagcctggacaagtttcctggattaagctccaaggtgccaggaagtctggaacaatatctccatatcaaaaacaatgaagcagctggcacaggggctcacgcctgtaatcccagcctgggcgacagagcgagtccttgtctctaaacaaaacaaaacaaaaactgctgctgccatagcacaggtctcatttaggaatggttttgtcaacttgcgggacaaatgagctcaaactcagtataaatggccagctgggggatgccatctctgctgctctgtatcggtttacatgaggacttagctgctagaa[134 bp omitted]caacatggtgaaatctcgtctctactaaaaatacaaaaatattagccgggcatggtggcgggtgcctataaccctagctactcaggaggctgaggcaggagaattgcttgaacctgggaggtggtggttgcagtgaggtgagatcgagccactgcactccagcctgggcaagactccgtctcaaaataaataaataaataaataaataaaaacagaatttacataccaacggatctcaatataggggtcttatttggatcttgatataaacaaatattttaaaatttatgacttttttttttttttttttttttagacaaggtctcactccagcctgggtgaggtgacagagtgaaactatgtctcaaaaaaaaaaaaaaaaaagagtccttatatcttagaaacacataaacacatactcattttttttttttggtggcatggtgtgatgtatagtgtattagctatctattgctaagtaacaaattttacccccaaatgtagcagttcagttgactttctcttgagagggagtctcattctgtcgcccaggctggagtgcagtggcacgatcttggctcactgcaacctccgcctcccggattcaagcgattctcctgcttcagactcccgactagctgggattacaggcgcccgccaccacgccctgctaatttttgtatttttagtagagatgggatttcgccatgttggccaggctggtctcgaactcctaaattcaggtgatccgccagcctcaccttctcaaagtgctgtgattacaggcatgagccacggtgcccggccacgcagttcagaacaatacttatttattatctcagtttctgcgagtgtagaatgtgtggatggttcagccctgccacaatcacacagcgggtgggaagaccacaggagttgcgggttgtaggtgggaaggggacctgccctcgggcggactttggtgccgctctgctgccatcttgtggcgggcacagaaacaactgccctttccacctggtccttcccatactctaaccattcttggtattttagaacttgctattcaaaatttttagtttttattctcccagttgctgaacagatgataaagtcacatggtttaaaattcatgaggataaacagggtcttcctctccctggggactctaggtttctttccaggggaactattctatgttatttctttttttcttttctttttttctttttctttttcttttttgagatggagtctcgctctgttgcccaggctggagtgcagtggtgcgaactcggctcactgcaacctccgcctcctgggttgaagcgattcttctgcctcagcctcctgagcagctgggattacaggcgtgcaccaccacacccggctttttttttttttttttttttgtatttttagtagagaaggaagttttaccatgttagtcaggctggtctcaaactcctgaccgcaggttatccgcccgcctcggccttccaaagtgctgggattacaggcatgagccaccgcgcccagccacttacttgtttcttgtgtatctttctgggaaaagttcatgtatatacaaaagcaaacaacacacacatacacgaccaacaacaacaagagcaccccccaaaacatgcccagcctttcccagtaataaaaggataatttgttcctggccaggtgtggtggctcacacctgaaatcccaacattttgggaggctgagacaagaggaccactgaagcccaggaattggagaccagcctaggaaacacagtgagatcccttctcaacaaaaataaaaataaaaaaattagctgggcgtggtggcccatgcctgtggtcccagctactgggaaaggctgaggtgagggaatcacttgggcctgagaggcagaggttgcagtgagccaggattgcaccactgcactccaccctgggtgacagaatgtgaccctgtctcaaaaataaaaaataaggccgggtgcggtggctcacgcctgtactcccagcactttgggaggccgaggcaggcggatcacgaggtcaagagatcgagaccatcctggctaatgcggtgaaaccctgtctctactaaaaatacaaaaaattagccaggcatggtggcgggtgcctgtagtcccagctacttggggggctgaggcaggagaatggcgtgaacccgggaggcggagcttgcagtgagccgagattgcgccactgcacttgggcctgggtgaaagagccagactccatctcaaaataaataaataaataataaaaaataaaaaaaggttagttattatgatcctgccagcatctcagctacatgaatgcgtggagtttttcagtattgttccctgctgatctccagtgtctggaacagtgcctgacacacagtaggtgctcaggaaatatatttcagttcgtaatgatgggaaatgtcaaacacacaaaaacacagcaagtagaataatgaaccccctgtacctatcaccgagcctcagcaaacttgcctcatctataccccacccaccttttcccctcaatggatttttaaatcaaagccaaggcatcatcatatcctttcatccatgaatacttcaaattctatctctaagagacaactccatatcacacctaaacaattaacatgaattccttaatacaactaaatatccagtcagggttcaatacccatttttttccattgggtcatataatattttttgtttgttcaaaacataaatatattatttgattacttgttcaaatcagtatcaataaatactgttccaggcatagtggcacatcacgatagtcccagccactcaggaggctgaggcaggaggacttcttttttttttgagacagggttttgctctgttccccaggctggagttcagtggtgtgatcatagctcactgtagccttgatgtccaggctcaagtgatcttcccacctcggcctccctagtaacttggaccacaggtgcacatcaccatacctagctaatttttttatttttatttttgtagagatgggggtctcactatgttgcccaagctggtcttaaactcccaggctccagtgatcctcctgtctcggcctcccgaagtgctgagattacaggcgtgagccactgtgcctggtcaaatgtgactactacttttttttttttttttttttttagacagtctcactccattacccaggctggagcacagtgtttcgatcttggctcactgcaatctctgcctcctgggtcaagcaattcttgtgctttagcatcctgagtagctggaattacaggtgtgtgtcaccacactcggctaatttttggatttttagtagagacagggtttcgccatgttggctggctggtctcgaactcctgacctcaggtgatctgcctggctcagcctcccaaagtgctgggattagtggtgtgagccaccgcatctggcccaaatgcgatttcttgaagctctcccttacctcaaagaacagagtctggctcttccattctgacagtaagcacaggtctatcattgccttcagttgccttcaggaccactggggtctgttgcagtcactttaggggattgagtctttggccacctctcagagtccttgaacagtctcagccagctgcttaggttgaatgatcaaagcagcaagtcctggcttcactgaaccaaaaatgtcccttccagaattggaagctgttctggtgttttctgcacaaaagtgtaaacatagattcaagttccagtgctttctgcatccaacagaattccatagaaggccctggctctgacctcgatggaatgcatggaagacaggaagatactcttaaacccagcctgctgcaaacacaggttacttccagcacgaaaaagttacacccgaggaggtggccattctcttctcaagaggtggtgagtctaggcccttcttgcagaagcagagctgcacatacacatctttttttttttttttttttttaagacacggtcttggtctgttgcccaggctggagtgcagtggtgcaatctcagccttctggtttcaagcagtcctcccgcctcagcctcctgagtagctgggactacgggtgcatgccagcacgtctggctaatttttgtattttttgtagagatgaggttttgccgtgttgcgtatgctggtcttgaactcctgggctcaagctatctgcctgcctcagcctcccaaagtgctgggattacagacgtaagccatcatgcccggccaaattccttatccttatctctttctctctctttttctttttctttttttcttttttgtttgttaagacagggtttcactctgttgcccaggttggagtacaagaggcaggatcacagctcacagcagcttcgaactcctgggctcaagtgatcctccctcctcagcatcctgagtagctgggactataggtgtgccactacacctggccaatttttaaattttttggagatagtgtcttgctgtgttgcccaggttggttttaactcctggcctcaagcgatcctttcactggcccctcccaaagtgttgggattataggaatgagacactgcacctgacctccttattattctctttttttttagacggagtctcgctctgtcacccaggctggagtgcagtgctgcgatctcggctcactgtaacctctgcctcccaggttcaagcgattctcttgtctcagcctcccgagaagctaggattacaggtgcacgccaccacgcctggctaattttgaatttttagtagagacagggttttaccatgttggccaggctgatcttgaactcctgacctcaggtgatctgcccaccttggcctcccaaagtgctgggattacaggtgtgagtcaccgcacccggccccttctcttttaaagtagaaaaaaaaaagccacccaccagagacataaatggcaatgcatgcatcaggcatggtgctaggaactttatacacatgtaatcctttcaaaaatagctcttttaagtaagaaaaatatgacccctccccatattaaatgaacaagggatatgaacatacaagtaatttattcaattaacaaatatttattgagcacctactatattttaggcactgtgctaaaatcaattccaatggtcaacaaatatgtgaacaaatggtaatcattattgaaggaatgcaaatgtacaaaaagtgacttttccatttttcacctattcaatggtctatattcaaaataaatgattctccaggattggatgagcgtggctttgggatctcttctactgtaggtagatgtacagctgcataatcttcctgaaggcacttgagcaatgtctatagaatggcttaaaatgcatacatatcttaaaaatggccaaccaggagcaggaagcactcctaacaacctgattgtggtttccaaatgccatttgggaaagtaccaaaatacctaaaggaaagaagagggctccttggaaaatggcgacttaaaggtgagagacaggaaatgaacaagatgaacttggaacatcttgtggtggcagacggggcaaataatcaaagaggactgggtcatagcaaaaggacacaggagccaactggaagaggctcttccacacccaacatggaggcatttgagcatcactgagggtgcaatttaaatggattgaaacacattaaacatcacacacacacacacacacacacacacacacacacacacacacacctgcatctaaatgcatcagctaccatggcagaatgctgggggagccaattcattattattatttctgagacagtttcgctcttgtcacccaggctggagcgcagtggcgcgatctcggctcactgcaacctccgcctcctgggttcaggcaattctcctgcctcagcctcccaagtagctaggattacaggcacgcgccaccacgcctggctaatttttgtatttttactagagatagtatttcaccattttggccaggctggtctcgaactcctgacctcaagtaatctgcctgcctcggcctctcaaagtgctgagattacaggcatgagccaccctgcctgacctcaactcattattatgaaaaccagtaaagagaaagaagcatttatcctgcaattcttttcttttcctttttcctttttttttttttttttttttttgagacggagtctcactctgtcgcccaggctggagtgcagtggtgcgatttcggctcactgcaacctccgcctcccaggttcaagtaattctcctgactcagcctcctgagtagctgggactacaggcacacaccgccaagcctggctaagtttttgtattttagttgagatggccgtgttgcccaggctggtcttaaactcctgagctcacgcaatccacccgccttggcctccctaagtgctaggattacaggggtgagccaaaacacccagcctcctgtgtttctttactatatcattgggtactaaatagtagctgaaggaaagttttttctttttttcttttttttttttttttgagatggagtttcactcttgttgcccaggctagagtgcaatggcacgatcttggctcactgcaacctctgcctcccaggttcaagcgattctcctgcctcagcctcccaagtagctgggattacaggcatgtgccaccatgcccagctaattttgtatttttagtagagatggggtttcaccatgttgatcaggctggtctcgaactcctgacctaaagtgatccacctgcctcagcctcccaaagtgctgggatcacaggtgtgagccaccacaccaggccagaaagtttttcttcataagaatattctagctaataaggaatgaataataagatatcgccattttgcaacctctaatgaacagatttatgaatgaaacatcaatggttgccaacatcacaaaaagagcaacacctaaatattatggcttccaatattaaccactgataaataatcttaacaaaaaaagaacctcaatttgaccagtcctctcaatctcaactaatttacaggaaatactagggatagaggagcatgttaaactacaccatgcagatgcagccggcaaaaactagacttggagaaggcaagtctacaaggcaaattatctagtttcttcaaaaaacaagaagttgcaaaaaaaaagccagtaaaggagaatagattgagaataatagagaaatacaagacatatcaactgcaatttgaggacatcatttggatcctgggaattttttataaaactgacatttatgaaacaaaaatttgaacactatcatacatgtaatggcattaaggtggtaacatcttttttttcttttgagacgcagtttcactcttgtcgcccaggctggagtgcaatggcgcaatctcagctcacagcaacctctgccttctgtgttcaagggattctcctgcctcggcctcccaggtagctgggattacaggtgcccaccaccatggctggctaatttttgtatttttagtagagttggggtttcacgttggccaggctggtctcgagctcctgccctcagatgatccatccacctcggcctcccaaagtgctgggattacaggcatgagctactgcaccaggcctgtttttttttttttttaaggagtgaaaatattttctaatgttgtcatgtgctttaaagatatgtatgaaatgtctgtggatgaaataatatatctggtatttacttcaaaaataacagagatgagagaagtgggtacacagacaaagcaagattggccatgagctgataattcttgaagctggtgatgaggccgctggagttcaatataagattctgtgtatttttgtatatgttcaaattttttcatgatagaaagttttaaaaagttactttttttttgagacggaatcgcgctctgttgctaattttttgtatttttagtagagatgaggtttcaccatgttggccaggatggtctttatctcttgacctcgtgatccccctgcctcagcctcccaaagtgctgggattagggattacaggtgtgagccgctgcgcccagccaaaaatttacatttttatctagcatttccacttctaggaatttaccttaaagatatattacacatgtacaaaataatttacgtgcaagggaaatattatgggattgtttgaaagaacaaaaaataatggaaagtccaggcacggtggctcatgcctgtaatcccagcacttttgagaggccaaggtgggtgggtcacttgaggtcaggagtttgagaccagcctggccaacatggtgaaaccctgtagctactaaaaatacaaaaattagccgggcgtggtagcaggtgcctgtaattccagctactcaggaggctgaggcagcagaatttcttgaatccaggaggcagaagttgcagtgagccaaggtcatgccactgcactccagcatgggcaacagagcgagactctgtctcaaaaacaaaacaaaaaaatggccgtgtgaggtggctcacgcctgtaatctcagcactttgggaggccgaggtgggcggattacctgaggtcaggagtttgagaccagcctggccaacatggtgaaaccctgtctctactaaaaagacaaaaattagctgggcgtcgtggcacacacctgtagtcccagctacttgggaggctgaggcaggacaatcgcttgaacctgggaggtggaggttgcagtaagctgagatcacaacactgcactccaacctgggtgacagagcgagactccgtctcaaaaaaaaattgataatgttaaataaattatgaaacacacagatgatggaatcctcaggagttgttaaaaaaaaataaggcagctatatatgtaccaatatggtctaatcttcaagatgtatgcataagcaaaaataccaatgtgttgaaatttgctatcacttgtgtaaaatatttttataaagagtacattatgcttatgcaaatattaataattattattcagatggagtctccactctgtcacccagactggagtgcagtggcaggatatcggctcactgcagcctctgcctcctgggttcaagtgattcttgtgcctcagcctccaagtagctaggactacagacatgagccaccacacccggctaatttttgtattttttagttgagacaaggtttcaccatgttggccaggctggtctccctgacctcacgtgatctgttttccctggcctcccaaagtgctgggattacatgcttatgcaaattaaaaatcaccaactatatacaagaacttggtgttagtgattgttccataaaaggtaatgtatgcaaattaaaaatcaccaactatatacaagaacttggtgttagtgattgttccataaaaggtaatggggtgggaaaggcatagagctattttatgaagattcacttatgtctgcataccatgttgtaactttaggccaggaagtggctcacaccttaatcccagcactttgggaggctgaggtgggcagatcacttgaggtcaaggagtttgagaccagtgtgggcaacatggtgaaaccccggctctactaaaaatacaaaaattagctgggcgtgatggtgggcgtctgtaatcccagctactcgggaggctgaggcaggagaatcacttgaatccgggaggcggaggttgcagtgagctgagatcaaaccactgtactccagcctgggtgagactcggtctcaaaaaacaaacaaaacaaaaaaacccaacaacaacaaattgtaactttaacaattttatcctatgactgtgctttaactattcagagtgacaaattttttttttttgagacagggtctcactctgtcgcccagactgttgtgcagtggcacgatcccggctcactgtggcctccgcctcccaggttccagtgattctcctgtctgagcctcccaggtagctgggattacagacacgcactaccatggctagctaatttttgtatttttagtagagacggggtttcaccatgttggccaggctggtctcgaacttctaacctcaggtgatctgcccacctcggcctcccaaagtgctaggattacaggaatcctacgaatcaattttgatatttttataaaaatccattctctccagattttaaaacagaaaaaagtcatgcatagtaagctatttttaaaaaatctttaccccctttctcattcataatattttttccttagatcacacttgtaaatagtcttattgtattgttaaacaaacaaccttcagatgaaatctgtttttccattctgttttcatttttaataattaatcttactgctgactttggtttatattgtaattttttcctaactttgagagttgactactcattcattcaacatgtttagtatgtgactggcagtgatgaggtgctggggatctacacatggagcacaaagccactagcttcaattctcaggttctgatgggagtacagctttggctatgctaaactagttctttttttttttttttttcttttttgagacagggtctgcacccaggctggagtgcagtggcacaatctcagctcactgcaacctccgcctcccatgctcaagcaattctcctgcctcagcctcctgagtagctgggattacaggcatgcaccactccacctggctaatttttgtattttagtagagacggggtttcaccatgttggccaggctggtctcaaactcctgacctgaagtgatccgcctgcctcggcctcccaaagtgctgggattacaggtgtgagccaccttacccggccactcttctgttaatttctaatcttctgaatttctaaccttttgattgaaggcctcataataattatgctttcccactatttttcagaataaatgatcataacaactggttatgaagacttttggatatgtgatgtattcataaggctctcctctcacatgaactccttatcagtgatactaataataaaattaatgacaatagctagtatttactgagcacttgtgtgtgataggtattacttctaaggctttacataaaatacctcatttagtcctcataaaagttctattagttagacataataatcaccacttaaaaataagtaaactgggttgggcatggtggctcacgccggtaatcccagcactctgggaggccgatgtgggcagatcacgaggtcagatcaagaccatcctggccaacatggtgaaaccccgtctctactaaaaatacaaaaattagctaggcatggcggcatgtgcctgtaatcccagctactcaggaggctgaggcagaagaatcccttgaacctggaaggcggaggttgcagtgagctgagatcgcaccactgcactccagcctggtgacggagctagactttgtctcaaaaaaaaaaagtaaactgagggacagagagtttgcataacttgcccaatgctatgtagtctataatcgggggaagtgagcactgctaagtaaagtatacgccatgatgaaaggcacagtcatagaatcttttttttttttttttctgagatggagtcttgctctgtcgccgaggctggagtgcagtggtgcgatcttggctcactgcaagctccgcctcctgggttcacgccattctcctgcctcagcctcccgagtagctgagactacaggtgcccgccactaggcccagctaattttttcatagtttttagttgagacaggtttcactgtgttagccaggatggtctcgatctcctgaccttgtgatccgcccgcctcggcctcccagagtgctgggattacaggcgtgagccactatgcccagccagaacctttttttttttttttttttttgagacagagttttgtccttgtcaacgaggctggaatgcaatggtgggatctcggcttgctgcaacctctgcctcctggggtcaaacggttttcctgcctcagcctcctgagtagctgggattacaggcacccgccaccatgcctggctaatttttgtatttttagtagtgatggggtttcgccacattggccaggctggtctcaaactcctgacctcaaatgatctgccggccttggcctcccaaagtgctgggattacaggcatgagccaccacgcctggccacagaatcttttaatcgggtcatttttgtattaggaattgtcagaaatttaacatattttgaatggcaagaagcagcttttctatattcatttttttttagcatagattatctgatgcttaggaaacagtgagtgaggcaaaaagaattcccacatttatttaattttctttgggtgtgagttttctgatgttctatgatggaagtgacaggtgttttctgacattaattacactacattaaaaattacctagtactgagccagatgtgaactccacataaaggcttatctttatcccttacactcaaggctttctaaccagtatgaattctgtagtgttcaatgagttgtgagccaagaataaatgcctgcccacactctctacattcgtaaggtttgataccaggatgaattctctgatgttcggtaagttgtgaactacgaataaaggccattccacactccctgcattcatagggtttctcacaagtgtgaattcgctgatgatgagtcagttgtgaaacacgaataaaggccttcccacattccttacattcgtagggtttgtcacctgtatgaattctttgatgttgaatgaggtatgagctacgactaaatgccttcccgcagtccttacattcatagggtctgtcgccagtatggactctctgatgtcgtgtgagctgtgcgtgctgtctgaaggccttcccacattccttacactcatagggtttctccccagaatgaattctttgatgtcgagtaacttctgagctgtgaataaagccctttccgcattccttacactcgtagggtttctcaccagtgtggattcgctggtgtacagtcagctgtgagtgctgtctaaaggctttcccgcattctttacactcatagggtctggcccctgtgtggattctccgatgcacagtgagttgggagccacgaatgaaagccttgccacagtctttacatacgtagggtttctcgcctgtgtgagttctttgatgcagaatcagctgtgaatgctgcctaaaggtcttcccacattctttacattcataaggtttgacaccagtatgaagtctctgatgtagaataagttctgatgtacgaccaaaggccttcccacagtccttacagtcataaggtttctcacccgtgtgaattctctgatgctgaacaaggtgtgaggcacggctgaaggccttcccacattccttacatccaaagggtttttcaccagtgtgaattttctgatgttgaataaggtgtgagccacggctaaatgctttcccacattcatgacattccatcagtttctcaccagtctccctgctctgacgtacagtgtgagacgtgtgatgctggaacacgggcatatgtccataggtgacgttcacttgcttaaaatagcactcttcattgacttgtctctcaaactggccttcgcattcccagtcagctctaaaatcggagccctccaggtcactgcatttaaggctttccattatctcccagttgaatgccccgatttcaaaaatgtctttttgtagaaatttctcacacctggactccaagtctgaaaaataagaaaaagataaatacaagctgtgatccttctctatgagaaataaaaaattctatagtagaggccaggcacggtggctcacatctgtaatcccagcactttgggaggctgaggcgggtggatcacaaggtcgggagttcacctggccaagatggtgaaaccctgtctctattaaaaatacaaaaattagccacacttggtggcaggcacctgtaatcccagctactagggaggttgaggcaggagaatcgcttgaacctgggaggcagaggtcgcagtgagccgagattgcgccactgcactccagcctgggcgacagagcaagactctgtctcataaaaaaaaaaaaaaaaaaaaaaaactatagtagaacagggagacaaaaataaataaccataaaaagtgaatgccttatatacatctcaaatattatgcaatttcaaaaaagcagatgaaagcacaccatgtgaagagctcacatggtgccagaagggagcaagaagacaaattaagccaggggttctaaatttgttttttgctttgagacggagtcttgctctgtcgcccaggctggaatgcagtggtacaatcttggctcacgcaacctccgcctcttgggttcaagtgattctcctgcctcagcctcccgagtagctgggattacaggcactgctaccacacccagctaatttttgtatttttagtaaagatggggtttcaccata[137 bp omitted]attaagcagtcactccccattccctattccctccagcccctggcaaccattactggcacagagctactaattctgtctctataaatttgcctattctggacatttcatgtaaataaggcatctatattttcaacacttcccaccacataaagttgatgtccatcaaaatgaaaatctctgcttaaacatttcactgccttcccatttcggtgcattaagaattaattccaaaggccaggcgaggtggcttatgccttaatcccagcactttgggagtccaaggcaaatggatcgcttgaggtcaggagttcaagaccagcctggccaacatggagaaaccctgtctctactaaaaaatacaaaaattagcaggcatggtggcaggcgcctataatcccagctgcttgggagaccgagacacaagaatcacttgaacctaggaggcagaggttgcagtgagccaagatggcactactgcactccagcctggaagacagagtgagagtccatctcagaaaaaaaaaaaagggctgggtgcagtggctcatgtctgtaatcacagcactttgggagactgaggtgggtggatcacctgaggtcgggtgttcgagatcagcctgaccaacatgaagaaaccctgtctctactaaaaatacaaaattagccggccgtggtggcacatgcctgtaatcctaactacctgggaggctgaggcaggagaatcacttgaatccgggaggcagaggttgtggtgagctgagatcgcaccactgcactccagcctgggtgacagagcgaaactctgtctcaaaaaaaaaaaaaaaaaagaattacaaactcactgccatggctcacagggctcttggcaaagcagatccctgcttgtttttgtcaccactgtgtctcagcaagagcagggcctcttcacattgaacattctcccctttcctcccagtgtacaaaaccaccagccatctatgagcatgtaaaataaatctaggccttttccatctcagatctctcatcaggttcttccatctatcaagaatcctgtcctgggctttttgctgcttttctcatccttaaggtctcagatgaaaactcactctctattttttttttttttttttgagacagagtcttactctgtcccccaggcgctcactgcaacctctgcctcccaggttcaagtgattctcctgcctcagcctcccgagtagctgggattataggtgcctgccaccatgcctgggtaatttttgcttttttagtagagatggagtttcaccatgttggccaggctggtctcaaactcctgacctcaggtaatccgcccacctcggcctctcaaagtgctgggattacgggcgtttgccactgtgcctggcttgtcttttttttttaatatttgacatggggtcttgctctgtctcccaggctggagtacagtggtgcgatctcagctcaccacaacctctgcctctggggttcaagcgattctcctgcctcagcctcccgagtagctgagattacaggcatgtgctgccacgcccggccaatttttgtatttttattagagacaaggtttcaccatgttagctaggctggtctcctgaactcctgacgtcacgtgatccagccgccttggcttctaaaagtattgggattacaggcgtcagccaccatgcccggcaaaaactcacactttcaagaaagctctcagcctgacagccctaaacacacgcctttatcctttctcccatttcttgtactctgtaacacttttgttgtaattagattttcatttacatattcatctgctgttctgtttgttttcttgttcctgaatcttccccaaagatggaaatactgcctttttcactaaccattgaaaccaacccagctgggcgtggtggctcatgcctgtaatcccagcactttaggaggctgaggcaggtgggtcacttgagctcaggagttcgaaaccagactgggcaacatggtgcaaccccatctctaccaaaaacacaaaaaattagctgggcatggtggcaggcacctgtgtttccaggtattcagaaggctgaggtgggaggatggcttgagcccagggacagaggttcagtgagccgagaatagtgccactgcactccagcctgggcaacagagcaagaacttgtttaaaaaaaaaagacaagacggcatttgtcagattggataaaataccaaaatctaggtgcacagtagtaacaagtaacacactttaagacatgaagacctaaggtgtttgaaaataaaaggtgtggccgggtgcggtgactcatgcctgcaaccccagcactttgggaggctgagatgggtggatcacctgaggttgggagtttgagatcagcctgaccaacatggagaaaccctgtctctattaaaaatacaaaattatctgggcatggtggcacatgcctgtaattccagctactcgggaggctgaggcaagagaattgcttgaacccagggggcggaggttgcggtgagccaatatcgtgctattacactccggcctgggaaacaggagcgaaactccatctcaaaaaaaaaaaaatagactttaaaaacagaaatcatcattttgggttaagcagggtagctctataatcaagaaagtaattccattcagcaggaagatttatgtttctaaagttatatacacctaatagcctcctaatatatatatttatttttatttattttttgagacagagtctcttttttttttctgagacggagtctcgctctgtcgcccaggctggagtgcagtggcgcgatctcggctcattgcaagctctgcctcccggattcacgccattctcctgcctcagcttcccgagtagctgggaccacaggcgcccgtcaccacgcctggctaattttttgtatttttggtagagatggggtttcactgaccaggatggtctcgatctcctgaccttgtgctccgcccacctcggcctcccaaagtgctgggattacaggcatgagccatggtgcccggccgagacagagtcttgctctgtcgcctaggctggagtgcagtggcataatcttggctcactgcaacctctggctcccaggttcaagtgattctcctgcctcagcctcccgagtagctggggctacagccgtgtgccaccacgcctggctgattttttgtatcttttagtagagaaggggtttcactg[140 bp omitted]agaaattaacaaaatcgtcatcttggagatttcaattcacctttctcagaaatag[133 bp omitted]acacggtgaaacccgtctctactaaaaatacaaaaaattagcctggcatggtgttgtgcacctgtagtcccagctactcaggaggctgagacaggagaatcacttgaacctgggaggcggaggttgcagtgagccaagatcccgccactgcactccagcctgggcgacaaagtgagactcaagggcttcaaggaaaaataaaagagagagagaaaaaaaaattaaaaacaaaaaacaaacaactccaagaacagatgagggggccgcatgtggtaggtcatgcctgtaaccccagcactttgggaggctgaggcgtgcaggtcagttgaggtcaggagttcgagaccagcctggccaatgtggcgaaaccccgtctctactaaaaatgctaaaatcagccaggcatggtggcgggtgcctgtagtcccagctactcaagaggctgaggcaggagaatctcttgcatctgggaggtggaggttgcagtgagctgagatcatgccactacattccagcctgggcaacagagtgagactccgtctcaaaaaaaaaaaaaaacaaaacaacaacaacaacaaaaaacagatgagtgaataaacaaagtgtgtatataatatgtacacatgtatattagtatttatacatgtatacatctacatacacacatacaatggaatattattcagccataaaaagaataaaattcagagacattctacaacttggataaaacattatccttagtgaaataagccagatacaaaaggccacatactggatgatttacatgagatacctagaataggcaaattcatacagacaaaaagtagaacagaggtgaccagggactggaggaaggaaaatagagttattgtttaatgggtacagagtttctgtttgggatgatgcataagctctggaagcagagtgtataatgctgtgaatgaactaaatgccactgaattatctacttagccaggcatggtggcatgtgcctgtagcaccagccacttgggaacctgaggtgggaggatggcttgaaactgggaggcagaggttgcagtgagccgagatcgtgctactacactccagcctgggcaacagagccagaacctgtctcacaaaaataaataaataaatattatgtaattttttttttttttgagacagagtctcgctctgtcgcccaggctgggagcgcagtggtgtgatcttggctcactgcaacctccgcctcccgggttcaaacaattttcctgcctcagcctcccaagtagctgggattacaggcatgtgccaccatgcccggctaattttttttttttgtacttttcatagagatggggtttcac[131 bp omitted]ttaaaaatctaataaataaaagattattatttttcagaactgcaagaaattagaaaacacaccaaccaaatattctgtgaaagacaagaacacttttatggaatcaacagcaataggcttaatattttaatacggaattacagtagagtcgtacccataaagttgtttttgttttattttgttttgttttgtttttgagatggagtcttgttctgttgccaaggctggaataaagatgcgcgatcgatcttggttccttgcaacctccgcctcccgggttcaagcgattctcttgtctcagcctcccgagtagctgggattacaggcacctgccaccacacatggctaatttttgtatttttagtagagatggggtttcaccatgttggccagactggtttcgaactcctgacctcaagtgatccacctactggtctcccaaagtgctgggattacaggtgtgtgccaccgcgcccgtccatacattgttaatttatgcatattcaattaactttgctaaaaaaaatacatacagaatgtggtaggtgggataacggcactcaaagatgtctgtgtctttattcctggaacctatgaatgttgtcacacagcaaggggagttggaattcagattgctaatcagggcagggcacagtggctcacgcctgtaatcccagcactttgtgaggccgaggagggtggatcacctgaggtcgggagtttgagaccagtctgaccaacatggagaaaccccgcctctactaaaaatacaaaattagccgggcgtggtggtgggcgcctgtaatcccagctactcgggaggctgaggcaggagaatcacttgaaccagggaggcggaagttgcgatgagcggagatctcgccattgcactccagtctggacaacaagggcgaaactccatctcaaaaaaaaaaaattaaaaaaaaaaaaaggctaatcagttgaccaccacaagatggcgagattatcccagtttatctgggtggacacaatgtattcacaagggtccttggaagtgaaagtgggaaggccaggtgcggtggctcatgcctgtaatcccagcactttgggagttttgggaggcctaggtgggtggatcacttgaggtcaggagtttgagaccagcctggccaacatggcgaaatcctgtctctactaaaaatacaaaaattagctgggcgtggtggcgcactcctgtattcccaactacttgggaagctgaggcaggagaattgcttgaacctgggaggctgaggttgcaatgagctgagatcgtgccactgcactccagcctgggtgacagagtgagactctgtctcaaaaaaaaaaaaaaaaaaacacataaaaacaaactttttctgtgaagggcccaatggtaaatgttttagggtttgttgaacacataaagtctctacagcatattctttttttttttttaacactttcaaaatatcaaaactgttcttggctctagggctgtatgaaaaactggttatggactgcatttgacccacagattgcagtttgccgacccctggtctagggcacagggaagtaaaagatggtatggtaaagatgttaaggtcttgctttgctcagaaaaagttcaaagatatgatcgatttcctaccatttttctttcttttttttttttttttttcccgagatggagtctcactcctgttgcccaggctggagtgcagtggggcaatctcggctctcagctacctctgcctcctgaaccatttttcaataaaaggaaccagcattcttttgagaactggctgatttcagggctgaggcaggaaaaatctgaaataaccatggaacatgctgtggtaccagaaaatgtggaagtatataaaagagaatgtgggtgtgttgagagaacccaggagccaagcttaacgagttttcaagggccaaagcctgaacgattcgagcaatgaaataaacaatgaaagtagtgactacagcccatagaataaaataaatacccacgaactcatcgtgatataaagaaatcattgaatgaacaagtgaatggaagagggctagggacagttcttccttattgaagaattccaattaataaatggtgaaggaataagggacacagaaaatcaacattagacaagtgacagagtaataactggtgcagacaaggtccagtgatggatgccaaaatcggagtgggaggaggaaaagcagcacatttgcctagtgtgaaagtatttcgccataagatatttatcaattacggatggaaacttcacaggggagaaacaagacaggccctatcttaccaagtgatcaaactgaacagcacctatcttttttttttttttttctgttgcccaggctggagtgcagtggcgtgatcttggctccctgcaacctccgcctcccgggttcaagcgattctcctgtctcagcctcctgagtagctgggactacaggcacccgccaccacgcccagctaatttttatattttcagtagagacggggtttcaccatattggccaggctggtctcgaactgctgaccttgtgattcgcccgccttggcctcccaaagtgtgaacagcacctatcttaccaagtgatcaaactgaacagcaccagtaataagccatgttgatgtctgatatgtgatatacagagaagaacataacatcacttctgtgatattcttgctaaaatgcagaatctcactgtgagaaaacattagacaaacgtaaagtgagagacaatctacaaaaaaatactcattaagaggatcagctggctgggtgcagtggctcatgcctgtaatcccagcactttggaaggttgaggtgggcaggtcacttgagctcaggagtttgagaccagcctggccaacatagtgaaaccctgtatctactgaaaatacaaaaattatccaggtgtggtagcgtgcacctgtaatcctagctactcaggaggctgagacaggagaattacttgaatctgggaggcggaggttttagtagagatggggttttaccatgttggccaggctggtcttgaactcctggcttcaagtgatcttcccaccttggcctcccaaagtgctgagattacaggcatgggccactgtgcccagccaataaaatggttttttttttggtttgttttttgagatagacgttcacttttgtcgctcaggctggagtgcaatggcatgatctcggtttactgcaatctccacctcatgggttcaagagattctcctgcctcagcctcccgagtggctggaattacaggcacccacaaccatgctcagctaagttttttgtttgtttgtttgtttgttttttgagatggagtctcgctctgtcgcccaggctggagtgcagtggtgtgatcttggctcactgcaagctctgcctcctgggttcacgccattctcctgcctcagcctcctgagtagctgggactataggcgtctgccaccgcacccagctaattttttgtatttttagtagagacagggtttcaccatggtctcgatctcctgacctcgtgatccgcccgcctcagcctcccaaagtgcagggattacaggtgtgagccaccacgtctggccaatttttgtatttttagtagagacggggcttcaccgtgttggccagggtggtcttgaactcctgacctcaggtgatccacccacctcagcctgccaaagtgctgggattacaggcatgagccaccatacctggccaagaaaataagtttttcttttttctttttttttttttttttgagacagagtctcgctctgttgcccaggctggagtgcagtggcgcgatctcggctcactgcaagctccgcctcccgggttcacgccatactcctgcctcagcctcccgagtagctggaactacaggcgcctaccaccacacccggctaatttttttgtatttttagtagagatgtggtttcaccatgttagccaggatggtctcgatctcctcacctcgtgatccgcccgccttggccttccaaagtcctgggattacaggcgtagagccactgcgcccggccaaaaataagtttttctaagggatgaagacacttgtagaaaaaaggatctggctaggtaccatggttcacacctgtaatctcactttggcctcccaaagtgggaggatcgcttaagcccaagagatggaggctgcagtgagctatgatcacgccactgcactccagcatgggtgacagagtgagatcctgtctcttaaagaaaaaggatacaaagtacaggtaaaaagttggccactggggaagaaataggtacatctctttttaaaaagaaaggaaaatgtgagagaacagagaccagagaggaattaatgggagtaggccaaggttctcttggaagctgacgctaataaagtctttactcgccacatcttcacgtttcaggcctttcttccacagtagggctttgagggaacttcccacagtaactcaagttactcctgtcagtcgactcatccagggaccttcccctgtcgaaatcggccctcgcttacctgggcaccatggtcctgtcacatcatttgcaatcatccagggctctttcccttgctccaataaggagacgacatcaggcttagaaatggagagtcctgtttacaggaaaagaaatggggtgtgatcagaccgctccaaaatccaaacccagttccctggtcaccatggaaaagacgcaattacaaggtaggtggaaggttgtccaaaggataggaagaccgagctgcccagcagaatgacttgtttctagttccacaaagcacaaaacaatttttcagtcaccagaaattcagtcagaaacttgtaagttgccctagaaattcataatgaagaaaccagaaattccagaagggtagtcctgaattatgtggagtaaatgtgtggtgatcactctccatgaacccctccttcccctccaatctattccttgatgctcctggccttgttctgtgcccagctctgggatcccgacagctcaccgtaaggactgcattacccatgccctatggcttctcattggctttggcagacagaaagcatcagctggagatcagtggacaggaggagagagagcaccaggcatttcttaccctcctctctccctcctttgacccaggagctctggaagtagctacagctattgctggccgggcctctctctatggctgtagtttgtagcgtctcctgtgacagtttcctctcctcacccatttaggcagagatggaaactgcaccccatggttgtagtccctgttgccttgctttccgtctggcccgtgtgatacaatctccttacctagtgaggccaagtgaccaaagttctccagagtcacctccctgtacaagtccctctgagcaggttccaggcacttccattcttccagagagaactctatggccacgtccctgaatgtcaccagtccctgaaacaataaacccacgcattagtgtacattaagaaacttttttcatttattatgaaaattttcaagatgcacaaaagtacagagaatagttgacagtaatggccccccgatatgcaccagtctgcttcaacagttaacaaggtgtaccctgttttatctcttcccttctatcttttattccccatgtactgtgaggcaaatcccacatgccaaacatcataatacttcacccacagatactttagtatccaacagattatcaacaacttctcttagaaaaacacataataatcagaatatcattatcatacttaataaaagtatcaataatttcccagtcaacagattaaattctaattgccccagtgttctcaattttttttcttttctctttttttttttgagacagagttttgctcttgttgcccaggctagagtgcaatggcacgatctcagctcaccacaacctccgcctcctgggttcaagtgattctcctgcctcagcctcccgaatagctgggaccataggcgcgtgccactgtgcccggctaattttttgtatttttagtagagaaggggtttcatcatgttggtcaggctggtctcgatctcctgacctcatgatctgcacgcctcagcctcccaaagtgctgggattacatgcgtgagccccgtgcccagcccacctgacccattttaaatgaggttaaaattgatgagtagggtcaggttttgacaagctaatttatccaggaaatatcttaatgagaagatgaagaatttttttttttttttgagacagagtctcgctctgtcacccaggttggagtgcagtggcacgatcttggctcactgcaacctcttcctcctgggttcaagcaattcttctgcttcagcctcctgagtagctgggattacaggtgtgcgccgccacacttggctaatttttatatttttagtagagatggggtttcaccatgttagtcaatcttgaactcctgacctcatgatacgcccgccttggcctcccaaagtgttgggatgacaggcgtgagtcactgcacccagcctaattttgatttttaatattttgtttggtagagacagaatctcactatgttacccaggctggcctcaaactcctggtcttaagtgatcctcctgcctcagcctcccaaagcactgggattacaggcctgagccactgcactcggccaaggacattggaggagatgaagaagggtactggaggaaggaggtaatgaagcatgacagaatctacagctgcaggcctgtggcatgaaggaagtataataagcacagttatatgactagaggtctatatattcttgagcattcctgtggctacacataaactatctgcagacagcaggacacttctatcttccatggtctgggaatgatcaggaaagagctaagtggggtcccataaataagcgaaatagtgaaatacacaaaacacacagcaaacctgggcctgg[136 bp omitted]tggtaattccagcactttgggaggctgaggtgggtgaatcacctgaggtcaggagttcgagaacagcctggccaacatggcgaaatcctgtctctactaaatacaaaaaattagctgcgcgtggtggcaggtgcctgtaatccaggtacttgaggggctgaggcaggagaattgcttgaacctgggaggcagaggttgcagtgtgctgatttgtgccaccacactctagcctgggcaacaagagtgaaactctgtttaaaaaaaaaaaaagaagtccagcctggtcaacatggcaaaaccctgtctctactaaaactacaaaaaattagccaggcgtggtagtgcacacctgtaatcccagctacttgggaggctgaggcaagataataacttgatccccggaggcagaggttgcagtgagctgagattgtgctactgcactccagcctgggtgacagagcgagactctgtctcaaaaaaaacaaacaaacaacaacaacaacaacaaaacccccaaaaaagaaattagctgggcatgatggtgcgtgcctgtagtcccagctactagggaggctgaggcaggagaatcgcttgaacccgcgaggtggaggttgcagtgagctgagattgcgccactgcactccagcctgggcgacagagcaagaccccatctcaaaaacaatataaataaataaataagaatgaaagaaggaagagagaaggaagttagaaaggagggcaggcaggcaggcagaaagacagagactgttattggttgcataatatcgtatgttatgtcttgtaagatacgtcgattccattattttcgtgcacttagcttaattaagatgtgtatgttaaagtggcttatatctaaaagagaggcaataacaaatgctagtgaagacgtgaacagaagggaacccttgtacactttgttgggaatgtaaatcagtaaaatcactatgcagaacaacttggaggttcctcaaaaaactaaaaatggagctaccttgtggaccagcgataccactgctgggtatctacccaaaagaaaggaaatcagtaggccaggcgtggtggctcacgcctgtaatctcagcactttgggaggccaaggcaggcagatcacctgaggtcaagagttcgagaccagcctggccaacatggtgaaaccccacttctactaaaaatacaaaaaattagctgggcatggtagcgtgcgcctgtaatcccagctacttgggaggctgaggcaggagaatcgcttgaacccaggaggcagaggttgcaccactgccggcatgggcaacaagaatgaaattccgtttaaaaaaaaaaaagaaagaaagaaaggaaatcagtatatcgaagagatatctgcactccatgtttgctgcagcactgtccacaatagccaagatttggaatcaacccaagtgtctgtcaacagatgaatggataaagaaaatgtggtacatatacacaatagagtactatttagccacaaaaagaatgagatctggtcatctgcaacatgaatggaactggaggttattatgctgcatgaagtaagccaggcacagagagacaaactgcatgttctcacttatttgtggatctaaaaatcaaaacaattcaactcatggtcatagagagtagaaggatgattactgaaggctgggaagggtagagggaggctgagtgggaggtggggatggttaatgggtacaaaaaatagaaagaataagacctactatttgatagcacaacagggtgactatagtcaataagaacttaattgtacattttttttttttgagatggagttttgctttgtcatccaggctggagtgcagtggcatgatctcggctcactgcaacctctgctctgggattcaagtcattctcctgcctcagtctccagagtagctgggattataggtgcccaccaccacgcccagctaatttttgtattttttagtagagatggggtttcctcatg[137 bp omitted]tataactcaaaggataaatgcttgaggggttggataccccattcttcatgatgtgcttatttcacactgcatgcctgtatcacaacatctcatgtactccataaatatatataccatgtactgacaaaaattaaaaattaaaaaaatttaaaaacacaagatgtgtaaaatcttcagggtttattatacgcttgctaatattcacattccttcactgtccacttttccttgctcctgaaaccagaaagctgatggagggtatacctgagttacataaatgtggcccacaaccaacacatatgttcaacctcaaaatggaccattttatggttattcatctcatacatatccttgcaagactgaagagtgttccgtcactgaagttcccaatcacagcccccttcctaaaggtctcacaaaacagatgttaccacatacagagaccaacaccaatcactacaactcctaccatgtctatgtggagagagaaggctgtgggcttctattgcaaacaccctgataatgggtaaaacataacacccttttaaatgaatttctttctttctctttttttttttttttttttgagacagggtctaagtctgtcgcccaggctgcagtgcagtggcatgatctcggctcactgcacttctgcctcccaggctcaagagattctcctgtctgagcctcctgagtagctgggactacaggtggcatgccactgcacctggctaactttcgtatatacatatcttttgtagagagagggttttcccatgttgtgcaggctggtcttgtactcctgagctcaggtaattcacctgccttggcctcccaaagtgctgggattacaggtgtgagccaccatgcctaactttgtgttttaaaatttaaatttaaatttttgtttgtagagacggggtctcaccccagctggtcttgaactcctggtctcaagcgatcctcctacctcagcctcccaaagtgctgaaattacagggtgagccactgggcctggccagaacttttcttaatgatggttatatctatcaacattttcccaccttagaaattaaaagaaagaaatataatttttttttttttgagacagagtctcattctatcagccagtctggagtacagtgatgcaatcttggctcactgcaacctctgcctcccaggttcaagcgattctcgtgcctcagtctcctgagcagctggaattatagacatgcgccatcatgcccggctaatttttgtattttcagtacagacagagtttcatcatgttggtcaggctggtctcgaactcctgacctcaggtgatctgtctgcctcagcctcccaaagtgctgggattacaggtatcagacaatgcatccagccgagaaattttaaaaatattttaacaacaaataaacctgttacctgttaatatcagtaacatacattttatgaaacataactctattgtcaaaatcaaaaaatttagtggcattgttttacatttttgtaaatatctttaatgactggccaactaaaagaaagttggattttttttttttttgagatggagtctcactctgtcacccaggctggagtgcagtggcgtaatctcggctcactgcaacctctgcctcctaggttcaagcgattctcctgcctcagcctcccgagtagctgggactatagacacctgccactgcacccagctaatttctgtatttttagtagagacggggtttc[131 bp omitted]ctgtgtcgcccaagccggagtgcagtggcgtgatctctgcttatgacaacctcggcctcctaggttaaagtgattctcctacctcagcctctcaagtagctgcgattataggcacccaccaccactgcacccagccatataaatatatatatatttgacggtattaagtgtcttgtgactttttaaagagggggtgacatttaaaaatagaataaagaataaagcagtggctcatgcctgtaatcccagtactaggaggctaaccaattgagccccggagtttgagaccagtctgggcaacacagtgagacctggtctctacaaaaacttaaaaaattagctggtagtggtggcatgtggctctggtcctagctacttgggaggctgaggtgggaggattgcttaagcccaggaggttgaggctgcagtgagccatgactgcaccactgtgctccagtctgggtgacagagcgagaccctgtctcaaaaaacgaaacaaaacaaaaacacagaagaaagaaaccacccaagacaatggaaaagatgaaactactttatttcatgtttggccccattcaaccacagttatgataagggagactctcatatttctctcaagagaaggtatttctactgtactggtgctctgctaagagcatttatttatttatttatttagacagagtctcgctctgtctcccagggtggagtgcagtggggaaatcttggcttcctacaacctccatctcctgggttcaaacgattctcctgcctcagcctcctgagtagctgggactacaggtgtgtggtaccatgcccggctaatttttgtatttttagtagagacggggtttcaccatgttgtccaggctggtctcgaactcctggcctcaagcaatcggcccacctcagcctcctaaagtgctgagattacaggcatgtgccactacgcctagcctatgctctgctaagaggactacagacacgtggacagtgctggagaggagagggccaccgagggacttgggcaccattactcatctcctggaatggaccaactgtgagaaggatacagggaagttccaggataaagaacacagtgtccatataatctggcgggaagacagatcattctaaggatagaaggaatttcaacatacctgggccatggcttttagaactatttgacctgctctgatttctctggattcttctcttggacaagtgcagagtcctgaaaaagcaaaatggggggagatggggtaacctctgataaactgagcttgcctcagcactcccaaatagatgagcttaaaagaattgtacttccaatgtctcggatctgcttctcccacctctccatgtcctaccacacaagaactaacattaagaactacagagttggccaggcatggtggctcacgcctgtaaacccagcaccttgggaggctgaggcacaagaattgcttaaacctgaaaggtagaggttgcagtgagccgagactgcaccactgccctccagcctgggcgacagagcgagactcgatctcaaaacacacaaacaaaaaacaaaacaacaacaacaacaacaaaaaaaaactgcagagttaagaaaacccagtcccttcctaaaaagtaaggaacccaaaagcagaaagatggtttcaaggcagatgtgctccagcactgacacagaacccaggcaccaccaagggagggattacagctgacacagtcccccatcttagtgatgctaaacttggccctagatggggcctagaaggctcccacctgctccaaattacagcaaggatcttacgactcagactcactcacttgacccctaaggatgaggacagcaccatcaggctaggaacacagaccatctatgcaggccaaatcttgagtaaaagacatccctaaacgaagtcttctagcttctctgggctcaacaggcaaaacctcctgggcatctcactggctccacttcctccttccaagtccaaaatgggactacaccatgcataccataggctctgtcaatgtctccagccccagctatactcaccagacaggagcaagaaagcctcagtaatacaggcatcttgcttgcatacccgcacatccagagtactgccctccatgggaactcaatttctagaagtctcttggcccagcactctttatttctcatctgagccctccctactgctttcattcttttttaaaactagacagctgggcacggtggctcacacctgtaatcccagcactttgggaggccaaggcaggtggatcacctgaggtcgggagttcgagaccagcctaatcaacatggagaaaccccgtctcaactaaaagtacaaaaaattagcggggcgtggtggcgcattcctgtaatcccagctactcgggaggctgaggcaggagaatcgcttgaacccgggaggcagaggttgtggtgagccgagatcgcaccattgcactccagcctgggcaataaaaacaaaactctgtctcaaaaaaaaaaaaaaaaaaagacaagtacagtagtgagaagagggggaagaatagaacaaggagttcaattcataactgactgtgaacaatcaatggagataactcactaccttccgaccatctactgcttttctgcagaacatcacttccccattgactgtgaggctggcagttgctgagtccgaagtcctgtgaatggcatacatctcaagggaatgagaaatcagagttttaaggagggttctttttttccttttgagacagggtctcactctgttgcccaggctggagtgcagaggtgtgatctcagctcaccgcaacctctgtctcccaggttcaagtgattctcccgcctcaacctcacaagtagctaggagtacaggcgcacaccactacgcctggctgattttttgtatttttagtagagacgcggtttcaccatgttggccaggctggtcttgagctcctcacctcaggtgatccgcccaccttggcctcccaaagtgttggggttagcagggtatgagctactgtgcctggcctaacaagggtattaaatctgatctaattagaggtccaagaagcttcctgtagggggtgtgtcaaaagaaatacttttttttttttttttgaaatggggtttcactctgtcaccaaggctggagtgcagtggcacaatctcggatcactgcaacctctgcctcccatactcaagcgatccttccacctcggcctcccaagtagctaggaccataggcatgcaccaccacgcctggctaatttttgcatttttggtacagattgggttttgccatgttggccaggctggtcttgaactcctgagctcaactgatctgcccacctcggcctccgaaagtgctgggattacaggtgtgagccaccgagcccagctaaggaagactaacttaatgaatgggaatggtgtcaagaaaacttttctgtaaaatgtagaataggaattgggttctgaaacctcagggaagtttaataggcagaaaagggacagagaatattgtgagcagagtgaaatgcagtggcaaaaacactggactgaaagcaaatggtgtatttgggagactaagaatgatttggaatgagttgtgtagtttgaagaaaggtctagaccagtgctgtccaaataatgttctgtgatgatggaaatcttcaaatctgtgctataaatattgtagtcatagatggctattgagcatatgaaatgtggctagtatgtctgagaaactaaagtttttattttattttaattaatttaatttaaatttaattagctctagaatctagaggcagataatgctggagatgacatcaggggttagaaaatgaaggtgtataggccaggtgtggtggctcacgcctgtcatcccaccactttgggaggccgaggtgggctgatcacctgaggtcaggagtttgagaccagcctggccaacatggtgaaaccctgtctctactaaaaatacaaaaattagccaggcacggtggtgcgtgccggtatccagctacttgggaggctgagatgggagaactgcttgaacctgggaggcggaggttgcagtgagccaagatcacaccactccactccagcctgggccacagagtgagattctgtctcaaaaaaacagaaaagaaaatgaagatgtatgaatgaaaaaaccatgagggcaaggaccagtgggtctgatcatcactctaaccatcactcttgccacagtgtctggaggacataggtgaccaataaatacaggctgatgcataaaagttaggttctttgggaagctgaggtgtgtcgttcgcttaagctcaggaatttgaaaccaccctgggtaacatagtgagccctcatctctattttttaaaaaaggtaggttttcagccgggcacggtgcccacgcctgtaatcccagcactttgggaggccgaggcaggcggattacctgaaatcaggagtttgagaccagcctggccaacatggtgaaactgcatctctactaaaaatacaaaaattagctggcatggtggggggcgcttataatcccagctactcaggaggttgaggcagggagaattgcttgaactcaggaggcagaggttgcggtgagccgagatggcaccattgcactccagcctggggaacagagtgagactctctctccaaaacaaaaaagaaagaaaaagtaggttttcacttattaatgaaatggaaggaaacctaagaatttaaagacagaagtgacaggaccaatatggccaggttattttggagaggtgtaaccttggagtcagaaagattgactgagaggtacttgtacttttcagatgtaggggtgggttgcccctacactttttcaggcacgaagagggcctgacccaggacattggcagcagaaaagaggaggagagagatgaattcaaaatgtagatgagattaaatcaacaggctctggcatctgacacatatggaggcagagaaaaggaagtcagaattctttcatatttactgggctcctgtgtcaactggcactgttctaggaacgaggaaagaaaataattcaagtccctgtcccagttgatctcacattctgtttttttttttttcttttttttgagacaaaatcttgctctgtcaccgaggctggagtgcactgacgagctctcggctcactgcaacttccacctcctgggttcaagcaattattttgcctcagcctcccaagtagctggaattacaagcgtgcaccatcatgctctgctaatgtttgtaacttttgtagagacggggactcgtcatgttggccaggctggtcttcaactcctgcctcaagtgatatccccacttcagcctcccaaagtgctgggattacaggtgtgggccattgtgtctggctggacctcacatcctatgggaagagacaaccaacaaacactgacatacggagatagatgggattgagggctgggcacagtagctcactcctgtcatctcagcactttgagggaccaaggcaggaggataacttgaggtcagcagctcaagaccagcctgggcagcaaagtaagacccccatctctacaaaaaatttgaagaaaaaaaaaagaaaaaagatgagatgtgagtatttagggtggtatggccatagacatgatattgatattcctaattatatgtcaggtggggccaggcacagtggctcatgcctgtgatcccagcactttgggagggcgaggcacgcggatcacttgaggtcagaagttctagaccagcctggccaacatggtgaaatgccgtctctactaaaaatacaaaaaattagctgggtgtggtggcgcatgcctgtaatcccagctactcaggaggctgaggtgagagaatcacttgaacccaggaggaagaggttgtagtgagttgatattgtgccactgcactccagcctgggcaacaaagactctgtcacaaacaacaacaataacaacatatgtatatatagatgtcaggtggcaaatgtcctacagataaaaacaaagaagattaaggggagagggagttttggaggaagagagggtggtctgagaaggtgacaggtaagcacagcctgaatggatgagtgagaaatgcaggtatctggggaagtgcacgccttgcaccaggagcggcaattgcaagggtctgaaggcaggagcaggctttcctcgatcaacaagaggaaggagacaagggcagctgggatggaacatgcgagacgaagagggtcagagagagagctagaagccagatcacaaggagcttgtaagccactgtaagaactttggattttattcttaaggaaaacaggaaggtacgaaacttttaaagccaaggaatggcataatctgatttatatttaaaaggggcggggcacagtggctcacgcctgtaatcctggcactttggaagatcaaggtgggcggatcacctgaggccaggagttagagaccagcctggtcaacagaagccctgtttctactaaaaatacaaaagttagctgcgtatggtggtgagcacctgtaatcctatttactcgggaggctgaggcatgagaattgtttgaagccaggaggcggaggttgcggtgagccaagattgtgccactgacaccagcctgggtgacagagtgagactccatctcaaacaaaaaaaaaaatacataacaaacaaacaacaaaacaaacaaacaacaacaaaaagaaaagaaaagaaaagaaatgggtcttagccagtgtggaagacattactatgtttcaccattatccagtttggggcacacagaaaatgacattttccagccccttgcacttaggtagggccatgcactgctctagccaatgaaatctcagctgaggtgatgactgtcacttcagttagagacagacaccagaaagactgcacaattctccaatttttctcttcatgcatgtggtgaccatctgtttttcaaatgatgcagctaaaggtggcgggccttctttggtgtggaaccctgtctctgctgatccacactggacatgtacatgagcagaaataaaatgtgactctgtaagccactgagattcaggggttgtttgccaccacagcataacttagcctgtcctaaccagtacacaaattaggccatactttgactagataaaaattcagactcagacgcttggtcaatatgagaaagagcaatttttaaaaagaggaagcttcagaaataagagcagagctgtccgattccagctctatatgtctcaaagggatttttcacaaacccataatgtgaaacaaaatgtgaattatgagttacaggacaatttttttttttttttttggcagggcagggacaggatctcactctcacccaggctggagggcagtggcgcaatcacagcttcagcctcctgggctaaggtgattctcccacttcagcctcccaagtagctgagaccacaggcatgccactacacctggctaattttaaaattttttgtaaagacagggtctcaatatgttgcccagtctggtcttgaactcctggccttaaatgatcctcccacttcagcctcctaaaatgctgggattgcaggtgtgagccactgtgcccagccaacaagttgattctgacccagcaaaaccatgctgttttagagctccaacatcaaaactttgtacaaatccttctggaaagttgagctatctctacaccacctagtaaaacttgaagctacgtgcctaaatgttccccatctctgcaattcacagacattctttagggcctgggatcccacatcacaagggcctaggctcaggggctgagataagttggccaagttatgggagctagacaggtacaggaatctccatcttaaccttagtaatctcttcctgaaaaagcaatcactctgagtaaaaactctaacaaaagcctttttcccaatgtttttattatttatttttttgaggtagggtctaattctgtcactcaggctgcagtgcagtggcatgatcacagctcattgcaaccttgacctcccagactcaagagattctcctacctcagcctcccaaatagctgggactacaggtgtgcatcaccacgtctggctagtttttaattttttgtagagatggggtttcgtcatattgcccaggctggtctcaaactcctgggctcaaacaattttcccacctcgacctcccaaagtgctgggattacaggcgtaatcatttacgcctgtaatttaccctaaaatggtaaattctttgttatgtttatttaaccataaaaccaagaaagtaacattattggttactgaaataggtaagtgggaactgggtagaaagaacaaagaaccggggctgggcgcagtggctcacacctacaatcccagcactttgggaggccgaggcggttggcaacttagtgaaagcccatttctacaaaaacacaaaaattagctgggcatgatggtggatgcctgtaatcccagctactcaggaggctgacgtgggaaaattgcttgaacccgagaggtggaggttgctgtgagccgagattgcgccattgcacgctagcctgggtgacagagcgggactccgtctcaaaacaaaaacaaaaacaaaaaacaaaaaacaaaccaacaaaaaacaatgggcaatgggattgggagagaagaaatgatgactcagtaaatccttttgtctgattctgacttttagaacaatgtgattgtttcacatactcagaaaaatcattaaattcaaccaggatgtgaggggaacccaaaataaaatacaaacagtaataaatgaacaatctatattacacataaatattatgaatacaaagggtttagggaagaaagtagttttagaaaactgtattttcactatatactgtaagactaaagacaaaaagaactgtatggtacatggaagtcagcaattcttaaattactttttacacaggactgagcaaatatatttatatatattaatacatataatggttaataaataaattatattatggttaatgtgagccacatttttcaatgtcaaagaaaggagttacaaaaagggaaatggaggcaagacatggtggttcacatctataatcccagaactttgggatgccgaggaaggagaatcacctgaggccaagagctcaagaccagcctgggcaaatagtgaggcccttgtctctacaaaaaatcttaaaattatatttaaaaaaaaggaaatggaggccaggtgtggtggcttatgcccgtaatcacagcactttgggaggcagaggcaggaggatcacctgaggtcaggagtttgagaccagcctgactatcatgacgaaaacccgtctttactaaaaatacaaaaaaaattagctgggcgaggtggtgggcgcctgtaatcccagctactcgggaggctgaggcaggagaattgcttgaacctgggaggtggaggttgcagtgagccgagatggcaccattgcactccagcctgggcaagtaaaattctgtctcaaaaaaaaaaaaaaaaaaaaaaaaatctggaaatggagagaaggctagaatgaaccctgtagtgttgcactgaaattggagatactatatgaactcatgaattatttgtatatacatacatataaacacatttcatagctgagaggacctagaagcaatgacatctcagaagcaatgaagatatctaaccttggtttcaaaaaatcatttttttttttttcctgagacaggctcttgtttcatcacccaggctggaatgcagtggtgtaatcttggctcgctgcaacctccgcctcccgggctcaagcaatcctcccgcctcaacctcccgagtagctgggactacaggtactcgccaccacacctggctgaaaaaaaatcattttctaataaaaggaaccaatggtccccgggaaatttgtagattccaggactggggcagggaaagtaccacatcaacgtggaacaccttgtggtgccagaaaataaataataaaaatagtaaataaagaggccacattgaaaggacacaggaatcgacttgaaggggctcccagtggccaaatgtgtgataatttgagcaaaaaaaaaaaatgatagcaatgaatatataacctatagaataaaagagattataacctatagaagaaattccagtctatacttatagaaataatttagtaaataaaaaaatgggaaagaagaaaaatatctttctaacagtaagattctaattaataaggccaggcgaggtggctcacgcctataatcccagcattttgggaggccaaggtgggcagatcacctgagatcaggagttcgagaccagcctgtccaacatggtgaaatcccatctctactaaaaatacaattattagccgggcgtggtggtgtgtgcctgtaatcccagaaacttgggaggctgaggcaggagaatcgcttgaatccaggaggcagaggctgcagtgagctgagatcatgtcactgcattcccagcctgggcaacaagagccaaactccaactctctctcacacacacacacacacacacacacacacacacacacaattctaattaataaacatagaagtggccgggcgcggtggctcacgcctgtaatcccagtactttgggaggccaaggtgggtggatcacgaggttaggagatcgagaccatcctggctaacacggtgaaaccccatctctactaaaaatacaaaaaattagccaggcgcggtggcaggcacctgtagtcccaactactcgggaggctgaggcaggagaatcgcatgaaccagggaggcggagcttgcagtgagccgagctcgcgccactgcactccagcctgggtgacagagcaagactctgtctcaaaaaaaacaaaaaaaaaaagaagaaaaaataaacatagaagtgatgatggaaacaaaccccaaaaccccaccatttgacaaatagctggtaacaactttttcaggcaagcgtcatcaacggataagactaatagatgaaaggaggataagaaacgggatattcacataggcttaaagtatttcttcacaagacatgtatcaattataatgggaaaaacagtgactttgcagcagagaaatctggcaatcaccgtcttaaccaagcggttaaaattaataccactcatagtgtaacgaattgacctcgtgggtccctggcatgatgcgccgagaagggtacatcgctttcggagtattcttgccccaaaggcagaatctgaatttaatcaacaggaaatatcagacaattccaaagagaggaacattctacactgcagactctacaaaacaaatggccaacatggtgaaaccctgtctctactaaaaatacaaaaaattggctaggcgtgtcaaaggagttacaaaaaggaaaatggagaccagacatggtggttcacatctctaacccagcactttgggatgctgagggaggaggatcacttgaggccaggagttcgagaccagtctggccaacatggtgaaacccccctccccccgtctctactaaaattacaaaaaatcagctgggcacgatggcatttgtctgtaatctcagcttctcaggaggctgacgcaggagaatcgcttgagcctgcgaggtggaggttgcagtgagctgagatcacagcactgcactccagcatgggtgacagagcaggactccgtctcaaaaaaaaaaaaagagcaaatgggaattctattgttgctacattttaaagtcttaaattcaaaatgaaaagtaaagaaaaaaatttaaaagaacattaggtatgcagggagcagggaggatataggcctttcagtccatctccaaggcacgcagtaaattactcctatggcaaatactggagaccaggttactttggtaggggtgagggtggtggtggggtggttctgaagtttcagaagaaggaaagaaaagcatgtcctgaaaaacaagaaggatttcagagaaataagaataaaacctgatgtacttgaacttggcacctttcttggagaagggttaagagcaaggaatcatgaacaaccaggtcatttttgaaccaccatcctccttacctaccatatagggaagtgtggtcacagaacaccaggcatctgcctaaatccagtgtcactcagaaggctgaggtcactcctgtccagggccagaatctgtcctaacttcaaaggttctgcatgggtcaagcactagagtcactggcacacttggtgctgcacatacagtcagtgtcacacaaacataaccacacatccactcttttatttttttgagacagggtctcgctctgtcacctagactggaatgcagtggttcaaacacggctcactgcagccttgacctctcaagctcgagatcctcccacctcagcttcccgggtagctgggaccacaggtgtgggccaccacactcagataatttttaattttttgtttgtttgtttttgagacgaagtctcgctcttgtcccccaggctggagtgcgatggcgcgatctcggctcactgcaacctctgcctcctgggttcaagcgattctcctgcctcagccccctgagcagctgggattacaggcacctgccaccacgcccagctaatttttgtatttttagtagagacagggttttatcgtgttggccaggctggtctagaactcctgacctcaggtgatccacccgcctcggcctcccaaagtgctgggattacaggtgtgagccaccgtgccagccattaattttttttttttttttttgtacaggccaggctggtctcgaactcctgggctcaagtgatcctcccacctcggcctcccaaagggctgatgtgagccaccacacccggccctacatccactcctgagacacaggacacaatcacagacacctctatacctttccagtcacaatatctttccagtcacaatcacacacccgctaagacacacccagtcacacaatctactctccactgtgatacagttactcccgtatagtcacaagccccacacaccaacacccacaaatgcctcatatagtcacagtcacacacccactcaggggacacacgccatcactggtactttacggcacccagtcacaactgaactttcactgtggacatacacacagtcacactcacacaagcaacccacacaagcagtggcaccccactcccgcatacacagcaccacacacatacacacaaacacacacaccaagggatacaggaatacacaagcggcgtcaccacacagtcacaggcacaggcaattgcacacggccacagtgtcacacaaccaaaaccacgcacacaccttggagacatgaatcacaaccgcacacccgcagtggtcacacagtcacaactgtactcacaccccaggaacagggcgaacaggccacatatacaacggggacacacgcagtatcacccccggtcacaaggaccctgcaccccgatactctctatcacacatggttacacaaaaaccaccagacaccctggagacaggcggttacacgtgcacagttgcagacacccacacccagccacacagccacaaagacacattcagaacggcgcatccgcagccagctcccgcctgcgcgcacagattcgaggctccggacacgccccggccccgcccaggactcccagacccctcaccttctgcctcccctggtcgcgtccgggtccttgcggagctaactagctcgccacgacgtcaagaacgacgtaacgtcaggccgctgtgggctctgggaattgtagtccagagctagatcggccacggacagaatggcgttctcttatctctgagtcggggcctggctcgttttgacatttttgcgcccacgagtcttcggagagggcgtcgccactccagaccttccagcaagcttgaagtcatctgacgctaaaggactacttacctcaagagctccatcgtcacagaaggaggcggccaagttcgcggggggaggggaggagacagagagtcgaccagtaaagcctcaagggaaatgtagtccaaggcctgagaagcgacgttgctggtaatagaaggtaattcagtaccagcctgggcctggccgcggtgaccgaggcgggccgcgtcgcggagacttctgggagtgcttcctcgctctccgagtgcgcaagcgcagcgcaccgagtggacattttggtctttgtccgcgggtcagtacggcccctgggtccacgtggcgcgaaagtaggaggtgggatctgggcgtctcgggtcggtcggaccggggaggttaaaggggaggattcctgatctttaggggcgcggcgcgagggcagggagtgggtgtaagagcttctggcctacgtgcggggcggagatgggggcctctgaggcgggtttgagcgagtgtgaccgagtttgtcctcaaagtttgacctgatgtttgggattgttgagtgaatgtgaaactgggtgcgggattgtgtgtgattgtgcctaagagggagatgtaggagaccagcattgaggtataacgtttgagctgcacttcccttgtcgaaagtgctgataattataacggtgccatcttcctggagcgtcttttttacttgaaaattgaaggggtggaaaagctaagtggtgaataattttaaaacgagtttttatataaaagcatttctttttaattggagtggcatgcaaatcaccgtgacttttttttttaattaaacgagagtgtttcgaaggaactttagtttcggggtgcctacttcagactattcaaatccccatctttggggtacttaaatagggctgttaagcaaagccctagactaaacagcattgtacgctttgagaagcaatcccatataacggcgcccaggatgagggagtcaacggttttaggttaggcacagttatcctcattttttgaagaaagcttaattgttgcagtgtttatctatgagtctggactaaatcctaggtgtcttaattccttaatgagtcgaggcgttctcaggttgtatggattttgtgaagtaatggagaatgctactgacgtctccaaagatgcgttttctaaggaaatcaccccgcccccgctgtcgtcattgacatagttttaaattacaaaaagttaaataaagtaattgggtaccaagttaatatctataaataaatagccttctaatttacaaatatcagttagaatacatagttgaagaaaactaatatttacaatagcagtaaaaagataaagtattgtggaagaaacttaaaggttcagaactattaggaaagaactttaaaatactactaaggggcataacaaatgtgaacaaataaatataccatgtgacattaagaagtgtgcgcaaacttaagtgaatgtattaatttactgtgatcttggtcgggtgcggtggctcatgcctgtaatcctagcactttgggaggccgagatgggtggattacctgagatcaggagttcgagaggagcctggccaacatggtgaaaccctgtctctactaaaaaaaaataaaataaaaaaatacaaaaattagccgggcgtggtggcgggcgcctgtaatctgagctaccgcggaggctgaggcaggaaaatcgcttgaacctgggaggcggaggttgcagtgagcccagatctcgccactgcactccagcctggacaagagcgagattccgtctcaataatagtaataatgtgatcctaataaaagtatggacaggcttttctcttttggaactaggggaactgatcctagacttactatggaaagagacaagctgcaagagccagtacagactgagaaagaaaaggcgttgaggtgtggggagatggggacccaacacattttaaatataaagcctcaggccgggcttggtggctcacacctgtgagccaaggcaggaggatggctagagtccaggagttagagaccagcttgggcgacatagtgagatctcccgtagtcctagctgcttgggaggctgaggtgggaggatcacttgagcctaggaggtcaaggctgcagtgagcagagatcctggcgacagcattccagcttggtggacagccagtccctgtctttttttttttttttttttttttttgagatggagtctctctctcttgcccagtctagagtgcagtggcccaatctctgctccctgcaacctctgccccccaggttcaagcgattctcttggctcagcctcccgagtagctgggattagttgcctgccaccacacccggctactttttttgtatttttagtagagacagggttttaccatgttggccaggctggtcttgaactcttgacctcaagtgatcggcccgcctcggcttcccaaagtgctaggattacaggcatgaaccacggtgcctggccgaccctgtcttaagaaagaaagaaaggagagagagagaagaaagaaaagaaaaacagttcatgcccatcagtgggagattggtgtacatcgatacaacaaaataatacatagctgtacaaaagaatgaggaggaagctctttatatactgagacagaaataacttcaaaatgtattgttaactgagagaaagcaaggtgcagaatgtagagtatgatacacgatgcatttggaataagaaaaggggtaataagaatatgtatttataatcccagcactttgggaggccaacgcaggcggatcacctgaggtcaggagtttgagaccagcgtgaccaacatggagaaaccccgtctctactaaaaatacaaaattagccaggcgtggcggcacatgcctgttaatcccagctacttgggaggctgaggcaagataattgcttgaacccgggaggcggaggttgcagtgaacagagattgcgccattgcactccaacctgggcaacgagagtgaaactccatctcaaaaaaaaaaaaaaaaattcaaaagatacatacgaaataataaaactggctgttggggtgggggtactggaatagacagggcaaaggctttgtatttttagtagagacggggtttcaccatggtgaccaggctggtctcgaactcctgacctcatgtgatctgcctgcctcagcctcccaaagtactgggattacaggcatgagctaatttttttttttttttttttaaattaaaggaagacataggccaaggagccagacttcctgtgttaactccttcctctgccactttttaccttggggacctcaggtaggtacttaaaccttgggcctcagttgctcatttcatagtatagaaataatagcaatatttgattcaaagggtggttgtgtagctccagaagttaatacatgtaaagttctaagaatagtccccagtgtgtagtaagtacttgattaatgttaaatactagtactttttattactagctgcaaaaaaaatgcttcctcagaaaatattatagtcctgtgtctggtaggaatttctgaaagaataagatatgtagatgcacttttgttattaatatttcttttttttttttgatggagtctcactgtcgcccaggctgcagtgcagtggcctgatctcggctcactgcaggctctgcctccctggttcatgccattctcccgcctcagcctcctgagtagctgggactacaggtgccagccaccacgcctggctaattttgtttttgtatttttagtagagatggggtttcaccgcgttagccaggatggtctggatctcctgaccttgtgatccacctgcctcagcctcccaaagtcctggcattacaggcgtgagccactgcgcccggcctaatatttctatattttaatttttttacttaaaattttctttttttttggtggagggggggacagagtctcggtttgtcgcccaggctggagtgcagtggtgctatcttggctcactgcaagcttcacctcccaggttcacgccattctccagccttagcctcccaagtagctgggactacgggcgcccaccaccacgtccggctaattttttgtatttttagtagagacgggatttcaccg[136 bp omitted]atcaggaagttaggtttgttttttgatttttgagatggggtctcactctggctcaggctgggtgcactggtgcgatcacatctcattgcagcctccacctcctgggctgaagagatcctcccacctcagccccacccccgcagtggttgggactacaggtgtgtgccaccacgacctgctaatttttaaacctttttttgtagagatggagtcttactatgttgcccaggctggaagttagatttctgtgtttgagttatgtttatctttagaaagtcatcattatccgctcctttggaagatttgttctttgatttctatgattacttttgcatggttctaattcagaatctctgatgattttttttttaattctaattgtgattgatttttggccagaatacatcagaggtgatcttacatacttcaaattgcataccattaggagagatataccagatggctggtgattgttacttccctttgaccaaaatgttatgtttactttggttcattctccatcagtcatttagtggatggttttaaaaccaatacataattcttggctggatgagtaaatttctacaggtattgtaaagtgatgattttctgttttttttgttgttgttgtttgtttgttttgtgtaaaaatgtagtagtctatacgttaagagaaacttctgggaacaaactagaaatgatccctggaagtatagtcttaatttctcttgtcttttcattccttttacatttgtttcattgttacatcaaattgtatctttttttccccctggctttttctttcttaaacatcatcctaaagttgtgtatatttagcgtgttctagaatcagctgcactttttgatgccagtggataccccttcaggtcattcttgtctcattttggctgacatcattgatcttggaaagttttcctgcactgcaggcttgtatcttcctcccagacttggaattgaccatttctccaaggagctctggttccttttattggagaatggtattagagacaagatcaagggtgtgctcattgcccaggggtaacattgttttaaggccattttaaattgcagagcatttaaaaaatacatttttaatgtatttttaaaaatcatgagtccatattcgtatttctaattcactttaaatggtatagtatttttacctaatttcttagctcctagttcttttttttaatttaattttattttatttttgagacggagtcttgctctgtcgcccaggctggagtgcagtggcacgatctcagctcactgcaatctccgcctcctgggttcaagtgattctcctgcttcagcctcccgagtagctgggactacaggtgcatgccaccacgcccagctaagtttttgtatttttagtagagatggggtttcaccgtgttagccaggatggtctcgatctcctaacctcaggtgatctgcccaccttggcctcccaaagcgctgggattacaggcgtgagccacggcgcccggcctcctagttgtattttatagtaaaaaatatgaaacaagttataagtacttattttgtttgctttatcctgcaatataaagaaaatggtttcagtaacaatgctgatactagtagtaaccataaacatactgtatcatgttaaaaaattctttctttaatatatgtaactatttttgttcttaaaatgcatcttttttttttttttgagatgttgtcttactcttttgcccagggcagagtgcagtggtgtgatcttggctcacttgcaacatctgcctccccagttccagcgattctcctgcctcagcctcctgagtagctgggattacaggtgcccaccatgacgcctagctaatttttgtatttctagtagagacagcgtttcaccatgttggccaggctggtctcgaactcctgacttcctactcgtcttggcctcccaaagtgctgggatttcaggcatgagccactgagcccagcttttaaaatgcatctcactaaagatgtatgtagtcaaagaactctgttctaaagtcatttgaaatcgtttttctgaggaattatgttactaaattaacatacagttgggttcatttgttgttttcaggttaagggactgcttttttttttttttttttttttgagacggagtctcactctgtcccctaggctggagtgcagtggcgcaatctcggctcactgcaagctccgcctcccgggttcacgccattcttctgcctcagcctcccgagtagctgggactataggtgtcagccaccacgcccggctaattttttgtatttttagtagagacgaggtttcaccatgttagccaggatgatcttgatctcctgacctcgtgatccacccgcatcagcctcccaaagtactgggattacaggcttgagccaccgtgcctggccaaggcactactttttaaaaaatgaatttgattactattgaagtaagtaatgcatttctgtgattcaacaaagatctatctcacagagatatctcattctgctcccttcccccagtcacattcttctttgtcttatgtaaacatgtcttgtttttttttgtttgcttcttgtttatccttcaagtgggttttttgttttttgttctgtcactattatatatttctcttcactcctgtttccctccaccttacataaaagatagcataccacatgcacctccctatatctcactttctttaataacagtatgtcctagagatagcccttccttttttctttcttttttttttttttttttttttgaaatagtctcgctctgtcacccaagctggtgtgcaatggtgttaacatggcatactgcagcctccaactgctgggctgaagtgatcttcctgcctcagccgcctgtgtagctgggaccacaggcacactccaccacacctggcttttttactttttgtagagatgaggtctcactgtttcccagattggtctcgaactcctgagctcaagcagtcctcctctcttggcttcccaaagtgttgggattacaagtgtgagccactgcacccagccaaggtgttccttcttaatcataatctttaaaagaaatttttttttcagctgctgtataaataagatgtcattatttggatgcaccatggttgattcagttaatcccgttgttgagcatttggattgtttccagtcttctgctgttgctaacaatgcagtaatgaataatttttttatgtgcgccattttatactgacacaggagtagctctaaactagactgctattaatacaaatggcgctgcccagtgggtaagtacttacactcccacaagccatgtgcgagagcgtcttccccttaaactcaccatgagtgtagtgtcgaatatttggtatttcgctagggacataagagacaatctgaacttcagtgtaggtttcatttacatcccttcttatgaatgagaatttttttttatatgtttaaaggcctgtatgtattaatctaggaactgtctattcatatccttttcaccatttttctatggggtgtcttctccttagaggagctgtttataaattagaaaggttagccctgtatgaaatgagtggtggctttttttttttttttttttgaagttttcatttgcatttggacattgttcacagtggtttcttttttttttaatcttgcagaaataagaggttttgttttaatttagtaataatagtttctttttttacatagccgtgcttagaatgagccccctgtggttggtgagcacagagacatccccgcaccacaccaaagacctttttattcatgtattttttagaggcacagtctcactgtgttgcacaggctggccttgaacccctgggcccaagcaagtctcagactcccaagtagcggggactacaggcagtgcaccac[139 bp omitted]gtgaaaccccgtctctactaaaaatacaaaaaatttagccagtcattgtggtgcacgagatcacaccactgcactttagcctgggcaacagagtgagactccgtctcaaaaaaaaaaaaaaatctagttacatttttttctttttgagatggagtatctctccgtcccccaggctggaatgcagtggtgcgatttcggctcactgcaagctccgcctcccgggttcacgccattctcctgcctcagcctcccaagtagctgggactacaggcgcatgccaccacgcctggttaattttttcgtatttttagtagagacggggtttcaccatgtta[135 bp omitted]gtttcaccgatattttcaaattcttataaagttacagttttttgttgtttgattgttttagagttggatcttgatctgtcacccaggctggggtgcagtggcgtgatcacagctgactgcagccttcatatcctcgctaatttaaaaaaaaaaaaattgtagagataagatctccctgtgttgcccaggctggtctcaaactcctgggcccaagtgatcctgctaccttggcttcccaagtcagagcaatagtttttttaagattttgtttttattttaatttataatccatttagattttatcctggtgtatgctatcagatatgcatccagctttacctttttccaattggctaccacgttctttgacatcatttattaaaaggtcttacctggctgggcacggtggctcacgcctgcaatcccagcactttgcaaggccaaggtgggtggatcacttgaggtcaggagttcgagaccagcctggccaatatggagaaaccctgtctctactaaaaatacaaaacattagctgggtgtggtggcacatgcctgaatcccagctattcggaggctgagacaggagaatcgcttgaacataggagggcggaggttgcagtgagctgagattgtgccactgcactgcagcctgggcaacaagagccaaactccatctcacacacattaaaaaaaggtcttatgtttactatttttaggatgccactttgattatatactaaattctcacatttatttggtctgtttctgggtgtgagcagaaagactgaggacactgctatagcccaggtgtaacaaccagggaaaatatttatctttttactattgaggctttatcattgtgttttactttgtggtatagctagtctcttaattgctcgtccttttcagtgtttcctggctattcttgcctgtttatttttctttgtaaattttaggattagcttgtctcgttccagagggggaaaaggtagaactagtttgttacttttattgggattgcattaaatttataaaataacttgggaatagggacatttttatgacattaaatattcctctttatgtacgtgatacgtattctcgtttctttttgggtcctctagggtgttttaaaatttttttcatacaggtttggacacttcttactaagtttatttctggatgttttgttttatgttgctatgaatggagtcattgttggcatatatgaagctgttgatttctacatactaatattattccctgctttccttagttatttgtaattagattatataattgaggcagtaggcatccttgtctgtttagaatctaatagaaatgccttcagtgtttttctattacttttattatcatgatttgcttttcagtgtttttacattagataagatactggcttttgtggtcagatacagattatgattatataaatatagattacccatgctgcctgggtcagtgggagtgtgagcagaaagactgaggacactgctaatagccaaggtgcaacaaccagggaaaatctgttgattgaggaaacaacaatccctcaaaatttcgttattgcatccttaaacaaaaaatcaaatgggacaaaaataagatgtctattcctattcttctgttttctgtcgattcccttcttttgggtgactgtttctttactcatttcctctgtttatcttttgtggtctatttatagctttgcttccttcttaaaagttttgtgtcttaagttcattttgttatgtttcagttttcatctgctttgtgattcttacttttttttttctggctcactgcaacctcaacctcctaggctcaagcagtccttttgtctcagcctgtcaagtagctgggactacaggtgcataccaccatacctggctagtttttttgtatttttttttagtgctaagcacgctggtcttgaactcctgggctcaagcagtctacccacctcagtgtctcaaagtgctgggattacaggcatgagccaccaagccctgcccctgctttgtgattcttttttttttttttttttttttttttgagacagggtcttgctttgtcacccaggctggagcacagtggcatgatcacggctcactgcaacgtccacctcccaggcttaagcagtcctcctgcttcaggctcccaagtagctgggactacaggcatgtaccaccccacaccctgctaatttttggatttgaattttttgcagagatggggtcttgccatgttgcctaggctggtcttgaacttctgagctcaagtgatcctgcccacctcagcttcccaaagtgctgggattagtggcatgagccactgcgtccagcccacggtaacatttctccctgtgtcttcagcagcagtaatagtctgacaactggcaagttcccatttctgttctagccctattctgagctcctgatctgtatatccaactgcctaatcgatctctctgcctgcatgtgttcagaaacctacactctgaatgtatagagtctcaaacttgatctccctcctgcaagttgcttccagccaactcaccttctcgtgtttctgtcatgtatgtttcggtttaaatcatgctctaagccttatatctctgacacaccccattaggaattgggtgatcaagctttttcaacatacatagtggatggggggtatatatgtgaaacttaaattttttatgattatgcttttttatatgattacaactttatagaagagttggaatagtacagagaagtcccatgtatcctttacccaatttcaccaatcatttacattttggttgttttatttttccttctctctttctccaaatgtgtatgatttttttttcctgaacgatttgaaaccagttgtggacatgcttcctttatctataaatacttcagcatgcattttgcaagaacaaaaacattctttttcataactacagtacagtgatcaaaatcgggaagtttaacattgatacattagtattatttaatccaaagtccatattcaaatttggtcagtcatcccaataatgtctgctattgattaaaaaaattcttttgggccacgtgcagtggctcacaactgtaatcccagccctttgggaggccaaggcaggtggatcacctgtggtcgggagtttgggagttcagcctaacacagagaaactccgtctctactgaaaataaaaaattagtggggcatggtggcgcatgcctatagtcccagctgctccggaggctgagacaggagaatcacttggacctgggaggtggaggttgcagtgagccgagatcgcaccactgcgctccagcctgggcaacaagagtaaaactccatctcaaaaaaaaaaaaattttttttttggctgggcgcagtggctcacacctgtaatcccagcactttgggaggcagaggtgggcggatcacctgaggtcaggggttcaagaccagcctggccaatgtggtgaaaccctgtctctactaaaattacaaaaattagctgggtgtagtggcgcatgcctgtaatcccagctactcgggaggctgaggcaggagaatggcttgaacccgggaggcagaggttgcagtgagcagagatcacgtcactgcactcccagcctgggcaacagaacgagtctctgtcacaaaaaaaaaaaaaaagatttttttttttcttttggagtgcagtggctattcataggcatgatcatgtatttgcagcctggaagtcctgggctcgagtgatcttcctgtctcagcctcctgagaagctggtactgcatgtgcacaccaccacacctggcttaaaaatgttttttgaactaatggatgaacctgtattccaggttgttgcttttcttttttatgacaaggtctcactctgtcaggccatcttgaactcctgggctcaagtcatcctcccacctcagcctcttaagtagctgagactacaggcgcacaccattgcgcccagctaattttgtatttttataaggacggtgtgtcactgtgttgcccagcctggtcttgaactcctgcactcaaaacgattcacccacttccggcctcccgaagtgttgggattataggtgtgagccactgcacctgggccaggacatctctaatatgaaataggacacggcacggtggcttacatctgtaatcccagcactttgggaggctgaggtgggtggatcacctaaggtcaggagttcgagaccagcctggccaacatggtgaaactctgtctctactaaaaatacaaaattagccaggtgtggtggtacacacccataatcccagctactcaggaggctgaggcaggagaattgcttgaacccaggaggcggtggttgcagtgggctgagattgcacaattgcactctagcctgggcaacaggagtgaaactgtctcaaaaaaaaaaaaaaaaaaagaaagaatttcactctcagtataatgcaaagagggtaaataggacttcaggaaaatgtttgagtttttattcttgagtactgtcagaacaacttcttcacattgtgcccatgtgctttagttctgatgggaacgtgttaaagtcagacatgggtgttgaattcatccacgaataagggctgtagttaaaatcctctcaggaccctgagtgggagtgtggtgctagagaaaaacagcaatcactcacacaaggtgtgaacagctctcctgtgtaagtaaaattctgaaaggtaattctccctttctcccatttctggatgtgtgtagactttaaatggtttaatgagcatggctttgaagtttaggattctaatggccctagtccctttgcccacatgattgtgtgtgctttagtcactaaggcagaaggtcattactttgttctgtgcatctttggaagttgcaccctcattcttcagaaggccaggagaccccagggctcagcctgagttctaggatggtactttggacccagcattaacattgtaatactgtgtcattttcccaatagttaatatgatcctctgttgaagcaagaagacaaactgtatggtggagaaagaagtgggaaggatctgcgcgggtgagtaaatgacaggcaggccacagtttttcagtcagcattgagtcctctgaagtgcttcaaaggatgttttcttccaggctgtagacatatagagtattgcttggtatgagatttttagattcctgaatgacgcttccagtcatcatttttgtgtgtttcattattcttcttctttcaccagattctagaggggccaggcgcccctcctgttgctgttctgatgtcagccttcctgcttcgtctgtgccgccactgtggtggctgttctccttcatccacataccttttcctgtcctcacacattgtcctttatactttgtaaaaccttacatattgtctgatattcaggttcctttttgttactaccttctctcatcctttctagtggctgaatgcctcagaattatattttacacctgttctcacacttcccgttgtcttctcactcatctctgccatcgtagatccatggactcctctgcctacctttcttctgctcccatgtacctctgtcataagttgttgacctagaaatcagtttttccctctgctacttttatgtgtgggggtctatatgtatggcacaattacagctcactgtggcctcagcttcctggcctgaagtggtcctcctgcctcagactcccgaaaaaatctcctcttaactcttgactcttagtcctgcagtttttttgcaaagttgtggtcacgtttacgcgtgtcacgtatatccttcttgaggtaacctaggaataagccagtatattatatctatgctgcaaatatatatacatataagccctaatttttccttttcatataaatggtggtatattatatattctattatgtacataagtttttttcttagaattctctgtcaacacataatttgttatttattttcatttttttgagacagagttttgctttgtcacccaggtggcagtgcagtggcacagtcttggctcactgcaacctccgcctcctggggtcaagtgattcttgtgcctcaggctcccgagtagctgggattacaggcatgtgccatcacacctggctaatttttgtatttttcatagagatggggttttgccatgttggccaggctggtctccaactcctatcctcaagtgatctgcctgcctcggcctctcaaagtgctgggattacaggtttgagccaccgcgcctggctaacgcataatttaacctgtctcctactaatgggcatttaggttgttttcaggcttctgctattgaagacacaagtgtgtatacttgtttatattgctttgcagaaatatgcagaaacaactacatagcatttactttttaagtggaatacagggtcaaagttatgtttataaatttaattgagataagcacattgctctcaaaagaagtaaacccatttacgtttctaccaagctgatatattcacatcctacaagtatttattgcatgatatgtattaggtactatttcagatgctagggaaatgtcagctatcaaaacagtcaaaaatttcttcctcctagggacggtgttataatggggagacagacaatgagtaaatacttaaaaaatgtatactatcagatagtgataagtgctatggaaaagaataaagtaagggaaaaccggtatagagagggctagttggggttgtaattttaaatcagcttggtggggaaaggtctcactgaatgccatttgaaaaaagatctgaagagtgcgagagtgggcgtgcagcattgggtggaagatcattagccagaaggaacaaaagtgttaaaagccctaagtcaggagaagcttgctgtcctgttcagagaatagtgatcagggccgtgggctggaagagagagggcaaaagggaataagagtagcagtggttaggtaacaggtcaaatcacaggtttcaacattgattctgagtgatttgggagacccaacagagggccagccttccttccttttccttttcctttttttgagactgagtcttgctctgtcacccaggctggagtacagtggtgcgatctcggctcactgcaacctccactttccaggttcaagcgattctcctgccttagcctcccaagtagctgggattacaggcacctgccaccacgccggctaatttttgtatttttagtagagtcgaggtttcaccatgttggctagggcttatatgtatatatatttgcagcatagatataatatactggcttattcctaggttacctcaagaaggatatacgtgacacgcgtaaacgtgaccacaactgactttgggaggccaaggcaggtgtatcacttgaggccaggagttcgagaccagcctgaccaacatggagaaaccctgtctctactaaaaatacaaaagttcttcttttttttgagacatagtttcactctgttgtccaggttggagtgcggtggtgccatcgtggctcaccgcagcctctgcctcccgggttcaagtgattctcctgcctcagcctcctgagtagctgggactacaggtgcccaccaccacacccggctaatttttgtatttttttggtaaccagttttcaccatgttggccaggctggtcttaaactcctgacctcaagtgatctgcccgcctcagcctctcaaagtgctaggattacaggcgggagccactacacctggactcattcttaagttataattaactataatatcaattcttattttggcatctccagagtttctgtcttgccttacacaactttacctgtttatgggacagacagctgtctaatttcattctcattgtgtcagaatgctacccaaattaaaattttcatcctattattttcagatccagagattacctcagaccagtttcatgttatttctggattatttcttttcccatggtctttgtaataggatcagtcaagccttaaaaagacacactaagctctctttaatagagaacaaagggccaggcacggtggctcacatctgtaggcgaggcggcagatctcttgagcctaggagttctagaccagcctgggcagcgtgttgagaccccgtatcttttttatttaaaaaaaaaaaggccagactcggtggttcacccctgtaatcccaacactttgggaggccgaggcaggcagatcacctgaggtcaagagtttgagactggcctggccaacatggtaaaaccccgtttctattaaaaatacaaaaactagctgggcgtggtgatgcacacctatcgtcccagctactcgggaggctgaggcaggagaatcggttgaacctgggaggcggaggttgcagtgagctgagactgcactccggcctgggcaacagagcgagactccatctcaaaaaaaaaaaaaaaaaacatacaaattatgtgactacaaatatgaacatatttctttctctttataaaatttttgaatcttggcctttgattatgaaatattctacttatgtaggtactacttatataaacttgaattcagttttcattaaaatgtttgttacttctgccttttttcctcttccctctgcttgtccattacttcatattttccagaggaacttacaagttctcagcaaatgataccttaaacatggttttagattttgccgtctatagtctgcattataatccggttaaaaggaaggtccatgttttatttttctgatcagtagtttgagaacgcatgagttgctgttaaataatctatgaattttttgtgtggaaatactgatcagttcttttttcttttttcttttttttttttttcccgagacatagtctccctctgtcacccaggctggagtgcagtggtgcgatctgggctcactacaacctccacctcccggtttcaagtgattctcctgtctcagcctcttgagtagctgggattataggagcatgccaccacatccagctaattttttgtatttttagtagagacgaggtttcaccatgttggccaggcttgtcttaaactcttggccccacagtgctgggattacaggtgtgagtcaccatgcccagccattcaattattttttcatatgaacattttttaaatataacaaatgctgaaggaatagttaaagaatctcttatgtaccccccatgtggattgaataattaatattttgccacgcttttgtatgtccgtatccatgtgtttattttgtgtgctgaggcatcatgatgttttacttctaaaaaattaaatatgtattttctaccaagaaaagcagctcctggccaggcgtggtggctcacgcctgtagtgccagcacttgggaggcagatacgggcagatcaccagatgtcaggagttccagaccagcctggccaacatagtgaaatcctgtctctactaaaaatacaaaaattaggcgtggtgatgcatgcctgtaatcccagctacttgggaggttgaggcttcaagaatcacttgaagccaggaggccgaggttgcagtgagtcgagatcgcaccactgcacaccagcctgaaggggtgggtttcccctccacagctgtgggcgtttctcgtcaggtggaaggactgacttggaaaagaaagagacacagaaacaaagtatagagaaagaaaaatgggcccaggggaccggcgttagggaggacctgcatacggaggacctctcaagaggaccggcctcttgagttcccttagtatttattgatcattatcgggcgtttctcggagagggggatgtggcaggacaatagggtaatagtggagagaaggtcagcaggaaaacgtgaacaaatgtctctgcatcataaacaaggtaaagaaaaaagtgctgtgcttttgatgtgcatatacataaacatctcaatgccttaaagagcagtgttgctgccagcatgtcccacctccagccctaaggcggttttcccctatctcagtagatggaatatacaatccagctttacacggagacattccattgcccagggaagagcaggagacagatgccttcctcttatctcaactgcaaagaggtcttccttttttactaatcctcctcagcacagaccctttacgggtgtcggactgggggacggtcaggtctttcccttcccgcggggccatatttcagactatcacatggggagaaaccttggacaatacctggctttcctaggcagaggtccctgcggccttctgtagtgtgttgtgtctctgggtacttgagattagggagtggtgatgactcttaaggagcatgctgccttcaagcatttgtttaacaaagcacatcctgcacagcccttaatccatttaacgctgagttgacacagcacatgtttcagtgagcacagggttgggggtagggttacagattaacagcatctcaaggcagaataatttttcttagtacagaacaaaatggagtctcttatgtctacttctttctacacagacacagtaacagtctgatctctctttcttttccccacacagcctgggcgacagagcaagactgtctcaaaaaaaaagggagctctcccatataacaaaataccgtttcacaccttagaagattaaccatgttgtcctaatattagactacccagtctatgttcacatttttccaattgtccccagaatgccttccatagttttttaaaattacagaatgtaatcagggttcaagctttgcatctggttgctcgccaccac[134 bp omitted]gcccggccagccagcatcttttgtcttcagctgcagaatggtgctgcaggtcttaccatatatgtgggtttaatctctgatttccgtatagcagctcattcctgtcatctcatttgctgaatgcccctgagctctgattaaaattctgcaggggataaacttccatttcatatgaaggtgtgtccagtcctttgttctcgtgactggacagtgcatgttcaactgttccttacacttttttttcagccaccatcctttattccttttgaataagggaatttgtaccattttctccttataattttaatggggttttgggaggaagcacttgttggttgatctattccttttcttagaaagatgagcattatttagccaggtatggtggtgcacacctgtaatcccagttactcaggaggctgaggctagagaattgcttgaacccaggaggcggaggctgcagtgagccgagatcgcaccactgcactccagcctggataacgagcgaaattccgtctcaaaaaaaaaaaaagaagaaagaaagatgaacattatttttcttccttagcatcccaggtagactttctaattttcatctttttcttctatttggcaattcttcattatttgttatacaacttgctaaattctgaaatggaaaggttatttttcaagagtactttcagctttgtggacccatgaatgttaattttctacctagatcacctcaagtagggttcccttctcataatttagttggaagcattaataatatagattattttcatattgggagatgggctaccagagttaatctcaaaaaattttattgctagtaatgggaaaattaacaaataaaagtgatagtaatataaaggtaaaatgaagggcttaccatatggcagccatggttctgggcactttatgaatttaactcctttgtgctatggttctttgtactccattttagaagaagcctgagaagatgatgcacagatagagaggcaccaggacttgagaggcaccaggacttgggaggcatgttgatccatctccaggaaagactgagaaaaagagcgttgaatataagaaaaaatacttcctctgttctcagatcgtatttgttttaaggccacacctttttgaagttttcagtttgaaacacaacctggactgaaatcatgagggaggttgtgtaggaaagaatcatcaagggacttagttgggagcttctctaccacagcttactccttatggtattaaccccctttaagtgtaaatgtctttggtttaaaacgtttgtacctcatctgttaccagagtgttcatactggagagaaaccctatgaatttactgaatgtgggggaactgttactcatatgttgcatttcgtcgaacgtgcaagtcatgctgaagagaaaccctgtgcttctaaggagtattgacaagcccttagctagatgacaatctcattgagaagcagaaaattcatgctggagagaaactagtgaaggtagcaatacttcattgaatattagaaaatttttctagagagaaagcattgaatatactgagtatgataacatttcctctcaaaccttatcccttactctgcatttgggagatcatacacagagaagccttataaatgtaagagatgtggaaatatcttcagccaaaagtaaatcctcactcatcaagaaatttttactggagagaaaccttgtgaatgtgggaaagcttccattcagatgtcacacctcagccagcagagaatttacagtggggaaaacccctttgcctgtaaggtatgtggaaaagtcttcagccacaaatcaaacctcactgagcatgagcattttcacacgagagagaaaccttttgaatgtaacgagtgtggaaaagcctttagccaaaagcagtatgtcattaaacatcagaacacccatactggcgagaagcttttcgaatgtaatgaatgtggaaaatcatttagccagaaggaaaacctccttacgcaccagaaaattcacactggagaaaaaccttttgagtgtaaagattgcgggaaagctttcattcagaagtcaaacctcatcagacaccagagaactcacacaggagagaagccctttgtatgtaaggagtgtggaaaaaccttcagtggcaaatccaaccttactgagcatgagaaaatccatattggagagaagccttttaaatgtagtgaatgtggaacagcctttggccagaagaagtacctcataaaacatcagaacattcacactggagagaaaccctatgaatgtaacgaatgtggaaaagccttctctcagcgaacatcacttattgtacatgtgaggattcattcaggtgataaaccttacgaatgcaatgtttgtggaaaagccttctctcagagctcatctctcactgtgcatgtgagaagccatacaggggagaagccctatggttgtaatgaatgtgggaaagctttctctcagttctcaacccttgctctgcatttgagaatacacacaggtaagaagccttatcagtgcagtgaatgtgggaaagctttcagccagaagtcacaccacattagacaccagaaaattcatactcactaaaaaccccatgaaagccttgaaagtgggaaagctttcattagaaatttgcacctcatcatgccccagaaataatccttctgaagcaaagcaccacgaatgaggttaactttaacaagtactaaaaacttaagggacaccagaaaatttgtactgaagagaaagacatgcatatgattaaaaccctgtgtccaacagagaaacctgcagcagagataatggtgaaagtttaggcacattttcactaaaagtgggaacagaaaatggaggcctgttttttattgctaccaccatagatctggagatcttcgccagtaacaagaaaaattaagttgtaaatattggaaaggaacagacaaaaatagatgacatggtcatctacaactaatattaagactcctgtggtattgattgagcagagcagaagagatttcaaaaaaagacctatgcatttattagaatttggaatatgatacaagtggcatcaggaaatgaggaaataatggaactattttttttaagtggaggtagtttgttctccaagggggaaaaatagaccatgaactatacacaaaagtgaatccagagattaaaaacagaaatatggaaaagctatgtactaaaatgcatatgaccttgggaatagggaaacattccttggaacaatttgagaaatacttagcggttctacttatgagtatgaatgctcaggaaatacgcactaggatatttactgtggcttgatttgtagtagccaaaaattagaaacaactgagaaagcccatcacgaacaatatgggaaattcttatgtaatactatatatctgtaaaatgcaacaaatgaaatccacatgtattaacagaaagatcccagaattgttgaggggggatcaagttgcagaatgatacagatagtacaatgacttttttgtaaatttgaattaaaagtttcctcataaaactcagtactatctattggtaatggatgcatatatgtatgtacatgtttttgaaacggattggaaggatacagaccaaactcttgatagtggtcacctgtgaagagtggagaagggaaaataatgagtgtgggaggtgggatgggtattggttaaaggggacttcagctttttatataaacatccacttctctttcaaaagacttcaagtaaatataagaagatactgattgattctggattgtggtatagggatatcttgtcttattttttgtacttttctgtatttttaaaatttctcaaaataggaatgggagtgaggatgggaatgctgtatctgtggaagtcatgttatactggattcatttccaattaaatactaaacattttatagaaaatatttctaaaattttatcacggatgaatggatggacttgctctctatgtaatatgaaattaatctattttattaaaatttaaaaggacagcacaatccaaatctgttttaattattttaacatggcatacacactatatcggggtccccagctccccccagctgcatggcaggaggtgagtggcgggtgagcgagcattgccacctgagctccacctcctgccagatcagcggtggcattagttctcataggagcgcgaaccctattgggaactgtgcatgtgaggaatccaggttgtgcgcttcttatgagaatgtaacgcctgatgatctgaggtggaacagtttcatcctgaaaacatcccatccccattcttctacccccacaaaccgtccgtggaaaaattgtcttccatgaaacaggtccctggtaccaaaaaggttggggaccgctgcactatatgatctctgtcttcgtatttctaacattttgcagaatgagcttagaaaactttaactttttctttgttcatacatgcacaggcttcatataattggtctttttcagttaggctgattttggaatgtcagttttcctctcctgcatatttccatgggaaacgtgtgcattaaatattaaatttttgataatatctttttttttttttttcccatcttgctctgttgcccaggccagaataccatggcaggatcttggctcactgcaatctcctctgcttactgggctcaagcagtcctccgacctcagcctcccaagtagctgggactacaggcacgcaccactatgctgtgccaattaaaaaaaaaaaattgtagcgatggggtctccgtatattgcccagattagtcccaaactcctggggtgaagtgattctccatggcctgttcaagtgctgccattacattacaggtatgagtcaccatgcccagctaattttatttttaaaaagagaaaacaacttcccataacttccacagttcagtgcattagataccaacacctgcgtgtctgtcttaacctgcgagctctgtcactcctcccactgctgttacagagagagaatgggacgggtatgagaaaaatggctcagaccctagacagagttctattttgtaaaccagcccttcatgaaaatttttttattctttgatcacattataatataaagaatattattaaaggttttcttgaataatggtgaatgtcaataatatacagcatttgagcttgattttgaaaccttaaaaaactcattaaatggcactgcatcactgtatcttttagcctttttggaggaattagatacttaaatgtctaaatgaatctgccctttatattatgatgtaccccatctttttctctgttttccctgtttgcacatatatttcacatttaaaggtgttgtctttatgatacagttggccctctgtatccatgggctctgcatccatttatcaacgaaccctggatggaaagtgtttaaaatatacaacaattttaaaaatacaaatgttaatatacaactatttggatagcatttacattgtattaggtattatgactaatctagagatgattctagctaggcatgtgccacacatctgtagtcccagccacttgggagggtgagctgggaggattgcttgagcccaggagtttgaggctgcagtcagccgtgattgcaccactatattgcagcctgggtgacagagaccctgtcgaaaacaaacaaaaccaggaggaaaaacacagggatggagacagatcagtgggaagagaattgagagtccacaaatgctatgggttgaatgtcccacccaaaactcaatgttgaaatttaattgccatggtaatggcatgaaaggttgagacccttaaaatggccatgaaggggctggtcgtggtggctcacacctgtaatctcagcactctgggaggccgaggcgggtggatcacctgaggtcacgagttcaataccagcctggccaacatggcaaaaccccgtctctactaaaattacaaaaattagccgggtgtagtggcacacacctgtaatcccagctacttgggaggctgaggcaggagaattgctccaacccaggaggcagaggtttgcagtgagccaggatcgtgctactgcactccagcctgggagacagaatgagactctatctcaaaaaaaaaaaaaaagatgtccatgaagtctccactttcatgagtaggattggtgtcatgataaaagggcaagttttgtccccacttgctgtctcttgtctttcctccatgggatgacataacaagaaggcccttgccagatgtcagtctctcagttgtggacttcccagcctccagaactgtgtaccaatatgttcttgttccttatacgttaaccagactcaggtattctgttataccaacacaaatcaattgatacactgtgggcaactgattttcaactagaatgccaaac[136 bp omitted]tggcaaaaccccgcctctactaaaaatacaaaaattagccagatgtggtagcgggggccagtaatcccagctacttgggaggttaaggcaggagaatcgcttgaacccaggaggcagaggttgcagtgagccgagatcgtgccgttgaactccggcctgggtgacaagagcaagactctgtattaaaaaaaaaaaaaaaaaaagtgttggggccgtgcgcagtggctcacgcctgtaatcccagcactttgtgaagcggaggcgggtggatcacctgaggtcaggagttcaagatcagcctggccaacatggtgaaaccctgtctactaaaaatacaaaaaattagctgggcgtggtagtggacacctatcatcccagtactttgggaggctgagctaggagaatcgcttgaacccaggaggtggaggttgcagtgagctgagattgtgccactgcactccagcctggcaagaagagtgtcaaaaaaaaaaaaaaaaaaaaaagctgggacaattgaggtacaaagatgaatttggactcttgcttcacaccgtatacaaaacttaactcaaaagtgtccaaagacctaaacataagagataaactcttggaggaaaacataggaacataggagtaaatcttcatgaccttagatttggcaacgattttgtaaatataataccaaatataataccaaagtataagcaggaacaacaaaagtagataaattggattttgtaaacatttaaaactttgtgtatcagacactatcaagaaactgaagttca[138 bp omitted]catggtgaaaccttgtctctactaaacataaaaattagccagatgtgatggtgcatgcctgtagtctcagctacttgggaggctgagacaagagaatgactgaacacgggaggtggaggttgcagtgaggcgagatcaagctattgaactccagcctgggtggcagagcgagactccatttcaaaaaaaataaagaacaacctattaaaaatgggcaaatttctgggcacggtggctcacacctgtaatcccatcactttagagggctgaggtgggtggatcacgagatcaagagctcgagaccagcctggccaacatggtgaaacccgtctctactaagaatacaaaaattaccaggcatggtggcacgtgcctctcatcccagctacttgggaggctgaggcaggagaatcacttgaacctgggaggcggaggttgcagtgagccaagatcatgccactgcaccccagcctgggtgatagagcaagactctgtctcgaaaaaataaataaaatgaaaattaaaatggacaaataaatagaatcattttttccaaaaaagatatacaggtgtccagcaagcacatgaaaagatgttcataaatcattgtgtaagtccagtatctgtttcttcttgacatggtcatctgctgattttcttttcccctgataattcatcacattttcccagttctttgtatttcaaataattttagattgcacccagtgcattttaagtattattttctaagactgtgttctgttcagattatctgagagtaaatgttgggtttttggttttggtctttttgtttgtttgtttttgaggcagaatttcgctcttgtcccccaggctggaggataatggggtgatctcagctcactgcaacctgtgcctcccgggttgaagtgactctcctgcctcagcctcttgagtagctgggatgacaggcgccctccaccacgcccggctaatttttgtatttttagtagagatggagttttgtcctgttggccaggctggtctcaaattcctgacttcaggtgatccacccacctcggccttccaaagtgtggggattacaagcgtgagccactgtgccaggcccaaactggataatttcaaatcctcagggaaggcagacttccattactggccaagatgggataagcacatttcagcatctctctcactgatttctatttaacaccccagagtgaatacaaaaagaaaccacctgaagattcagaaatacaagtaatagcaggcagatgtgaagggagttaaaaacgagaagaatggacacgatgaccatatgtttgctgggggattttcctcctttatcttttggctttggaaggagggaagtctcagagctgtgtgatgggttcagggagcataaattatgagagaaatgccttccttccagccagaggagtccaaaagaggacctggtgtgacagagtgagagaggggttcttttttttaattgagacagggtcttgctatgtcacccaggctgggggtgggggtggcacgatcttggctcagtgcagccttgaccccttgggctcaagtgattctcccacctcagcctcctgagtagctgggactagaggcatgagccaccacacccagctactttttaaaattttgtagagacaggggtctcactctgttgcccaggctgatttcaaactcctgaactccaggaatccaccctccttggcctcccaaagtgctgggattacaggtgtgaaccaccacacccagccttcccttttttctgtttttcttcttttctctactggccttgcaccaagaacagccccagtcattaggctgctctgccactgccgtagctgtcaaccaaaccaagaaaaaagacccatgggatcccatgtctgtgtgtctgagtggctgggggcagggggtgtcctctctttctctctctctattcttgccacctcaccacaaagtggagctaggtctggtcttgtgaaaacgtgcctgttgggggcgctgggagggcagctgaaactctgacagaaggccggatgcggtggctcacgcctgtaatcccgggaggccgaggcgagcgaatcagttgtcagaagttcaagaccagtgtggtcaaaatggtgaaacccttctctactaaaaatacaaaaattatctgggcgtggtggtgggtacctgtcatcccagctactcaggagactgaagtaggagaattgcttgaacctggaaggtggaggttgcagtgagcaagatcgtgcactccgacctgggcaacagagcaagaccctaaagaaaaagtttattaatttttttttaaaaaggaggctgggcacgctggctcacgcctgtaatttcagcactttgggaggccgaggccggtggatcacgaggccaagagatcgagaccatcctggcaaacatggtgaaaccccgtctctactaaaaatacaaaaattagccgggtgtggtggcatgcgcctgtaatcccagctactcgagaggctgaggcaggagaatcgcttgaacccgggaggtggaggttgcagtgagccgagatcgtgccactgccctccagcctggcgacagagcaagactacgtcttaaaaaaaaaaaaaaaaaaggaattgtcgaattctacgccttagattagaacgtgtctttttcatccactgtggttggtactcgataggcttgtatcttgttgacggtcagttttgggaccttttctcgtattatgtggtaattttcattgttgtgttttgttttcttgaatccctactgttcagtggctaggctagaaactgttggaaactcttaatttatcatgtgacgttttatttcttttgagtttagggatccacagcctgagacccggcgagcctcgctgcccttgcgagagccatggattcgcatttgcgcagagtcggggtctgttgctacgggtcccctgggctcctttgaatcgctttggcagctccctcggtttagagctacagggttttctccctcccctgagactctaacgcgtgcaccaactcgcgcctagagggcgtgtatgaccccagctcagttctaagccgaggggctgctgccggacattctagggtctgatctggcgggctcgaagggaggacagtcactgcgacccggaaagctccgcgcttacgacgcccacccagaaaatccggatcacatttcccgtggtccaccgcgcatctaggaggttacctgcgtccaggcggtgacttgcgagggaccacctttcccagggtccacggcgcatttaggtggtggcttgctctggactacatttcccagggtccaccgcggatctaggaggaggcttgagatgcagcctcccagcttcgaggctaccacctgcccgaattggtgctttggcagagtctctggtgcccgggtgaatgggttcagggtctcttaaggaccctccgttgacgatgcctcgagctatgacccaccctggctccgtccacggttgtcggggtcccgggctgcttttcttggagggctcggtgccggaggctactcttgagtcccggttccttcgcccagctgcgggcctcgggctactggatccgctgtctcggtttgggtgcggggccttggctcaggcggaacccgaccgggatcgccccgcgagatgcagtcgttgagggagtcaggagcccgggtctgggcggggaccccaaggctgctggagccggagctggcgcgggggagacgtgtgtgtgcgcgcgtgtgtctctctgtgcgcgcgtcagtgtgtgcacgcgtgtgtctgtgtttgcatctctgtgtgtgcacacgtgtgcctgtgtgtgcgtctctgcacgtgtctgtttgcctgtggtgcacacgcgtgtctgtgtgcgtctctgcgcgtgcctgtttgcctgtgtgcacacgtgtgtctgtgtgcgtctctgtgcgcacgtgtctgcgtgcgcgtgtctctgcacaagtgggtgtgcgcgcacgtctccgtgtgtgcgtgtgtgtgtgtgtggcgctagccctagccagctgtttgacgtgcatgattgtgacagcagcatgcatgattgtgacagcagcattaggtgtgtggccacttgtaaccacgtgaatggcttttcttgactgtgtgtaactcttgcttatgttattgactgtatgtgaatagttacagagggagtgtctgtattgccgaagtagtgagagcatgatggtgtgtcatgagcagttttagtgaaaggtaggaagcaaccagggtgtttttctttctacatttacacacaccactcaccaatgtgtggagtttttttctcccacactaaacagttcttcagcggacaccaactgggtgtgctacagttcagtgcaattccaactgtacctggagatagcagcagaacccatcggttaagggcttagtcccaaaatactgcccccgcttcagatgccaattgcaggtcccaggatgtgacctgtgcttctgacctactggctataaatcaaggttgccatgacccctcaagtttgagtattttgctagagtggttcacagaactctgagaaacactttatttatgtttacccatttattataaaggatattgacaaggatacagattaacagccagaaggaagagatgcatagggcaagatatgggggaggggtgcagagcttccatgccgtctctggctgcaccaccctccaggaacctttacgtgttcaataatccaggagccctccaaaccccttagtttagcagtttagtttagtttagtagtttagttttagtttagtttagtttagtttagtttagtagtttagttttagtttagtttagtttagtttagtttatcccagtgtaggggtgggttgcccctacacacctgtgggtgtttctcaaagagggggatgtgtcagggtcacaagacaattgtggggagagggtcagcagacaaacacgtgaacaaaggtctttgcatcatagacaatgtaaaggattaagtgctgtgcttttagatatgcatacacataaacatctcaatgctttacaaagcagtattgctgcccgcaggtcccacctccagccctaaggcggtttttccctatctcagtagatggagcatacaatcgggttttataccgagacattccattgcccagggacgggcaggagacagatgccttcctcttgtctcaactgcaagaggcattccttcctcttttactaatcctcctcagcacagaccctttacgggtgtcgggctgggggacggtcaggtctttcccttcccacgaggccatatttcagactatcacatggggagaaaccttggacaatacctggctttcctaggcagaggtccctgcggccttccacagtttttgtgtccctgggtacttgagattagggagtggtgatgactcttaaggagcatgctgccttcaagcatctgtttaacaaagcacatcttgcaccgcccttaatccatttaactctgagttgacacagcacatgtttcagagagcacagggttgggggtaaggtcacagaatctcaaggcagaagaatttttcttagtacataacaaaatggagtctcctatgtctacttctttctacacagacacagtaacaatctgatctctcttgcttttccccacacccagctacttgggaggctgaggcaggagaatctcttgaacctaggaggcagaggttgcagtgagccgagatcttcccactgcactttagcctgggtaacagggcgatgctcagtctgaaaaaaaaagataaagcaaagaaaaaagaaatttacagtttatgagcgaaaacaacatggctataatttccgcaatgtagacatttccagggtgtaataagatagttggttgaaagctggggataaggatatagaagatgttttgtgtctaccttgaggaggaagaggtgggacatgactgattagggataaaggagagtagagtgcagagtcttgggagacaggacctggctgtccaggcaagtgtggtgtgggcgatgttaatgactttcatgggatggacagatgccaaattaaagcagcatatgctaaagggttgttttttttttttgaataatgagggcaaacagtgacattttgcaaagataaaattctcccttttcctagacgaggtctctcctactctcacaccactcaacactcaataaagaacatttctgacaccagatgtgtgggttttttctccacacaccaagcagttccccattagacaccaactgtaggactacagttcagttcagttctgacaccacctacctggagatagcgtcagatcccacaggctaagggaccagtcccacaagatccttccacttcagatgtccatctcaagagccaggtggtgacctgtacttctgaccagctataaatttggggtttccacatcctctcctcaggtgtgattaatcttctaggatggctcacagatctcagggaaaccatttacttaacattagtccatttagtataaaggatattacagctgggcatggtgttgcccgtctgtaatcccagcactttcggaggctgaggtgggcagatcacttgagcccaggagtttgagaccagcctcggcaacatagcaaaaccctgtctttattaaaatacaaaacttagcttggtgtggtggtgcacgcctgtagtcctagtactagggagaccaaggtgggaggattgagcctaggaggttgaggttgtggtcagcccagatctcaccattgcactccagcctgggcaacagagcgagaccctgtctcaaa[136 bp omitted]aaaaatgcaaaagttagccgggcatggtggtgggcgcctgtattcccaggtactcaggaggctgaggcaggagaatcgcttgaacccgggaggcagaggttgcagtgagccgagatcgtgccactgcactccaacccagacaacagagagagagtgtgtctcaaaaaataaaaaaatgaaaataaataaaaaggatattacaaaggttttcgatgaagaggtacctagggcaacatatgtgggaagtggcattgggcttcaatgccctcaccccagcacatcatcctccaggaatccccacgtgttcagcaatctggaagctctctgaacccaatccttttgggttttcatggaggcttcattacataggcatgattgataacatcattggccattgtcagtcaactcaaccttcagctgctgtcccctccccagaggtcaaggggtggggctgaaagttccaaccctcatatcacattctgaggccatccaggagcccaccaagaagtcacctcattagaacatactatgctcctatcagccaggaaatcccaagggatttgagaactctgtgtcaggaactagggtcaaagaccagatattagaacaaatgatcctcctagtacccaagggttttaaggagctctagaccaggagctagggacagagaccaatatatgtgtatttctttttattttatattcccagctccccaaggttatccattttaaaagtctagtaagtttcctttacctctctccttgctcaaacatgcacatacatatattgagtgacttttattcccttttgcctttactagaattatatgtaatttttttttttagcttgtgtttctagggaagaccttatggatgtccttccaaattagtgcttactgatttgctgatttgagtagtacttggaaggacgtaatttttttttaattcaagctttttattatggatactttcaacattatatatgcagagagcctagtacagtgaatccacctttgacaattaacacatggcgagttttgcttcatctctatttccacttgattattttaaagaaaattccaggcatttcatctataaatatttcagtatgaaatatagttcttttaagaacttttcttaaaagacaattttcgtatcatcatcttaagaaaatgaacaattcctggccaggtgccatggctcatgcctgtaattccagcactttgggaggccaaagcaggaggatcacttgagtccaagagttagagaccagcatgagcaacatggcaaaacctcgtctctacaaaaaaatacaaaaaattagcctggcatggtggtgcgcacctgtagtcccagctacttgggaggctgaggtgagagcatcacctgaacctgggaatttgaggctgcagtgagccatgatttcaccactacatttcagcctgggtgacagagcaagatccctgtctcaaaaaaaaaaaaaaaaaaaaagaaaaagaaaaaagaaaaaaaagaaaaaagaccaatttcttaaaattacataatcagttgcagttgatttgttcaaattagaattagtttagagtttaaacaagatctacacgttgagcttagaggataaagctcttatatatctttttttttttttttttttttttttttttttgagacagagtctctctctgttgcccaggctggagtgcaatgacacgatctgggctcattgcaaccttcacctcccggattcaagcaattcttccccctcagcctcccgagtagctgggattacaggtgtatgccaccaggcctgactaatttttgtatttttgtattttttttgtttttgtttttgagacagagtcttgttctgtcacccaggctggagtgcagtggcgcgatatcggctcactgcaacctctttctcctgggtttaagcgattctcttgtctcggcctttcaagtagctgggactacaggcatgcactatcatgcccagctattttttgtatattcagtagaggcagggtttcaccttgttagccaggctggtctcaactcctgacctcaagtgatttgccaatcttggcctctcaaagttttgtatttttgaagagacggggtttcatcatgttggccaggctggtcttgaacttctgaccacagatgatctgtctgcctcagcctccaaagtgttgggattacgggcatgagccaccacacccagctgtctcttatatatcttttaatctattgacttcccttttttcttgctatttatgttttggagaaatcaaacactagatcatatagagtttccacatactgcctttgagtacacccccatggtactgattaacaaattagatgctctgtattttctctaaaatatctggtaattaactagagcagtggttctcaaccagttgtgttttttgtttctttgtttgcttgtttgttttctctagaagacatttggcaatgtttggagatatttttggttgtcacaactggaaggaaggatggtattgctggcacctattggctagaggccagggtgctgctaaacatcctatactgtacaggacagcctcctcccatcccaaagaattatctggtccaaagtgaaaatagtgtcagagttgagaaactgtgctctagagacttgatcaaattcaagttcagttattttggcaagatctgcttgtcactattttgtgatcagatttgttagtgggcttaagtgtcatcaatgtgatttatccattgtaaagtgattgccttttgcataatgtcatgcattcactgatgatcaatgcctagattcattatgttgttaggagttgcaaactgatcactttcttattgtgtctctctttcagccattactggaatccttttatttccattactggaatttccattactagaatccttttataaaaataaaatctgcccacatcaacaatctgattactcagagggatagcatgtgtaggaaagggaggataaatgcttgattctttccattcatattcattagttttcagaattacgaatttcagaatactgcattggtttcctagtttccaaaggtgattgcagcagattgtattttccaaagatggttgcaataataggcttgttccatatgttattctagaatcttgccattcccactttaagaggtggagtctaactcctctgcctttgaatctggattggtttattgtttataaccaatgctgtgtgactcccagggctcagtttaagaggcactgtggccttcacctcattagctgaaactccagtgtttgaaatcttgagccattatctaagaaggtccaagtgctctgagccgccatgctatgaggaagccaagtcacatggggaggctactagtccaagtctttgagtcctcccaccccaggtaccagacatgtgtgcaaagcaggcttcataggtttgcagccctcaggtatcaggttattcccagcctttgaatcctcctggttgaggccacagacatcaggagcaggggcaaactatctgctctgtgagctgtctgaattcctaacccacagaatcagtgagcacagtaaaatcattgtattatactactgagtttggagtggtgtattatacagcatcagtaactggtgaacaatgactgatatacccacacttgtttatgtcatattacacacacacacacacacacacacacacacttttttttctttagaggtggggtcttgctgtgttgtgcaggctggtcttgaactcctgaactcaagtgatcctcctatctcagcctcccaaagtgctgggattacagatgtgagccactgca[135 bp omitted]ggtgaaacctcatctctactaaaaatacaaaaattagctgggtgtggtggtacacgcctgtattcccagctacttgggaggctgagtcaggagaatcgcttgaacgcaagagtcggaggttgcagtgagctgatatggcagcattgcactccagcctggcaacagaatgagactctgtctcaaaataataataataataatatgagcaagaacaactgcacctaacaaataaaaactgatggtaatacataaggttacacaaatattcaaagacatatcatgattcgaaaaccacattaactgttctcttggctatcccataccaagtggagccaaaggctctgcacaggtttccaaacccgaatcatagccatgatagcaactgtggtcctctccctcctggttacctgctcacctgaagcaggtaagagcctgcttggcttcctagagaggcacttctgaggcaggagaataggaaattagtataaccaagccaggcgcagtggctcacgcctgtaatcccaacactttcagagtccgaggcaggcagatcatgaggtcaggagttccagactatcctggctaacagggtaaaaccccgtctcaactaaaaatacaaaaaataagccaggcatggtggcaggcgcctgtagtcccagctactcaggaggctgaggcaggagaatggcgtgaacccaggaggtggagcttgcagtgagctgagattccgccactgcactccagcctgggcgacagagcgagactccgtctcaaaacaaaaaggaaaagaaaattagcataaccaagggttaaggtggaagcaaaagaacagcaggtgcagcaagttctaggccaggttaagcagcacacaggccacatcctcactcctgtgatgacaacacagaagtctccagttcagcctctggccacgggccaatccttcatagggtgtaaccaattgaagacctcgaaaaggcacttatgggtgttatcaaattctttagcttaataactctaaagaacattgtaatctgggctcctgagccgcttgctctagcccactctggctctgtagagtggacttttgcttcaataaatctgcagtttcgttgcttctttcttctttcgtggctttgatcttttgttgcttcgtgtagtttgtttaattctttcttcagtgagccagaaacatggacaacttgcagtcaagaccttccatccagtaaaacttctacattctagaagtctcagtattgccaagagatgtcaaggcatcaaggggtcaaggttaaggcctaagattaaggctcaatgttatacgtgccctgacactgggggaaaacaaggagggctgaatggattaactgcaaattccctgccccaatgtactcctttgaataaggtgccctagcccaagcacttccttcagaggccaggcacagtacctgcttactgcgtagtagtgggcgtcaggttccagccagcctgcagaattattcaaacaggccattcacaccctccttcaagaaccaggggttacctcccatactcttggtactacaaagcctcctggaatagcctccacctgattactgtgttcctgagtgcaacacactgtaccccacatggtgtgctgggctctccttccctggggcgaaagtatgggtaattagcaaaccaatgttcatctcatctatccagtgttagctaccatgtgcttagcaataatctgcacttcctttctaattcttgagagacatccgggtcctctgctcctgggtggaggattttagaaaaaaggtcactcagaatgggcaggtgacttgaacgcctgcgggtccgacacagcaccaaacctcgccaaggccttcagaaaccaaaagtgcaactgccaggaaaatgactgcccgttccagtcacaggaccggctacacgacccaggcagagaccgagaaagaggctcaccaaaaaggccaacatgcaagaaactgccctccagagaacaggggacgtttgtccaaagacatacatgcacactcccattcacacacacagccccagcaatttttttcaggggctgcagcctgatccagagcagagcgcagtcagccttggcaaggcgcatacacaaatcgcgagcggatgctcacgtcacagagaccgccaccgttgcctggagatgagttcttcactctctgcgaaggaggagccttctgtagcagcgcatcggctcggggctaagtctagtcctcactggggcgtcgacgggatggtatccggaggccaggattcgcggaggttcgaccaggaggaagaaacctcaggcggagcgtctgggaagcagcgcagtatcccaggctcaggcctgcgtggacggtgtgccggtgagtctccccaaaagtcgtgcccttgcgatctccaggacaggtctgcttgtatgcccaagggctgctctctcaccccagggtcgttgtcgctcagagcagaacccagaggcttcaggggctgcctggagatgaatgttactgtgccactgcagtatgtctgggttgtgtctctttctcttatttctgttttcattctccgtctatcactctctaccagtttccgtccgtgtgtgcgcgggtgcgtgcgtgtgttgggatgcatgggcaatgaagggcggtttcttgtaccttggcctttcttctggtgagtctctcctcgcatctctgtctgggtcatgtggccgggtgtcattcgttttccaggcggttacagtttgggttcgtgaccggtgggcaacgtggggagctacatgagacacggcggggattaaatcagctcccaatcatgagcggcctcattgctagaatcaagacaactacaccccagcaaaggaaaaaattctcacaaaagctcatcataaacctgcttatgcaggtcgaggtgcccatcgacctcactcctctcaatcctctcgcgtgtgccctcactgagaaatctagccacagctcgatacagggacggaaaaggaagccggcaacgggatggggcaaacatctctgtggctccaacgctggccttcgtggccaagtcacccgtttggcactcctccccggatggccgtggtggtggcattgccgccaatcctgcctgggctctggcctctgctctgtcctccctcttgctctgtctgccctgtttctgagaggcctaggggcttgttagtctggctcaatgtcttcaacccagaagacttcccagtccatccgggagaaagttcctgggggtcggtgtcatgattgtttccttctccaaacctctttcagcatgattgggcaggtgtggtgatcctggagctctgggctttcatagctgtctgggacagggaagctttctgggtctctgtggccccgtggtcggtccaggaagagcgggaggcaacccgaccgttcctgacatttgccttctaggaaaggcggtgtggcatgccacctgcacttcctctctgattcttgagggccatcgggttcctctgctcctggggaaagagacttctagcactgaatcttctggctgccacggatgtcagggagccaaagggactgggttttgctgggtgcaggggaggtcgcgtcgggggtacctacccggtcgcggggtgggggtggggtgtagtttgtggaaagctctcggcccctctggcaggcatctctgaatgtggcttggattcgggcgcaggccctgtctcgcaggttttcaggtgcgcttggcttttcctcagctttgttgcggaggtctcccgtggcccccgggcgcacggctggacaccactgtccgtctcgccatcgccccctacggcctcaaagacacctgctcactccatctgcttttggggacgtcggtgccacgtgtggtcacactggctccatctcggactcgcctatgtctgtctttgcacgtgtcgcgggaagcagtgtcggtatgccggagcccccgggccttggagatgaaggcaggccactgctccacccaggaaggagggaggcagtgggctcgtgtgtcagttcattttccgccgacagcacgccttggggctctggggatctttctgtgccccagcgagacccttcccgcctcactgcattgcaaccccattctcgatcacccggtgggatccatcctcggagccgaagaggagtctgcacagcccagccggcaccctgaagctcctcctccactgggaacgaagcagaagaccgatcaaggaggtcctgacggcaggacccctacgggtccgaccctgggtctcccgcaggcccctctggcaatcctcttcccacccgccgcctcgggctgcgctgccttcgccgccgcaagcgccgccaccgccgccccggtccccgcaacctgccgcgtcgccgccattttttaaagggtccgcagcctgactctctggggcgaggggcgagtcggcctctccagtgcgcatgcgcgaggccggagccgccgctttggtcacagggatcaccaccgttgccccggggtgagtccctgagactgggccaagtaggaaccctctgtgaccgagcgtcagagtcggggctgagatcagtcctggccagggcattaacaggatggtctcggaggccgggattcgcggagggtcgaccagcagggagaagcctcaggaggaagaaacctcagacggatcgccggggaggcagcgcgggatcccagcctcaggtgtgtgcggacggtgtgcccgtgagtctccccaaaagtggtgcccttgtgatgtcgaggacaggtctgcccgtgtgcccgtgggctgctctctcaccggtgggtcgtagtcgcggagagcagaacccagcagcttcaggggctgcctggggctgggtgttacctgctgtatgtgtgtctgcgtttggggtgtgtgtgtgtgtgtctgtgtgtgtctgtgtgcccacttatgtctctctctgatatctctctctctcccttctcgctctttccatcgctctcttttactatctctgtccatctgtgcctgcgtgtttgctgggacacaggtgccctttgcaccagagggtggtttctcccacgtcagcctttcctgtggtcagcctctccccgggtctctacctgggttgtgtggcccgttggcagacgttttcccggcggttccagtttgggtttgtgaaggcctgggcaacatgggcacctgcgtcggacccgcagggattttcatcccctccctatcctgagcagcctctttgctgggatcaagacgaccacaccccagccaaggacaaagtcctcagaggggctcattgtccacccgcaggagggtgcccacagatcttgaagaagacgcttctcactcctcttgccctttgccctccttgagaaatgtagccacagctcgacacagggacggagaaggaagccggcaacgggatggggcaagcatctctgtggctcaaacgctggccatcttggccaagtcacccgtttggcactcctccccagatggccgtggtggtggcattgccgccaatcctgctggtctctggcctctgctctgtcctccctcttgctctgcctgccctgtttctgagaagcctaggggcttcttagtctggctcaatgtcttcaacccagaactcttcccagtccatccgggagaaagttcctgggggtcggtgtcatgactgtttccttccccaaacctctttcagcataattgggcaggtgtggtgatcctggagctctgggcttccatagctgtctgggacagggaagctttctgggtctctgttgccccgtggtcggtccaggaagagcgggaggcaacccgaccgttcctgacatttgccttctaggaaaggcggtgtggcatgccacctgcacttcctctctgattcttgagggccatcgggttcctctgctcctggggaaagaggcttctagcactgaatcttctggctgccacggatgtcaggaagccaaagggactgggttttgctgggtgcaagggtggtggggtcgggggtacctacccggtggcggggttggggtggggtgtagttcgtggaaacctctcagcccctctggcaggcatccctgaatgtggcttggattcctgcacaggccctgtctcgcaggttttcaggtgtgcttggcttttcctcagctttgtggtggaggtctccagtggccccccgggcgcacggctggacatcactgtccgtctcaccctcaccccctacggcctcaaagacacccgctcactccatctgctcttgggggacgtcggtgcgcgtccgtgtgaagagaccaccaaacaggctttgtgtgagcaacatggctgtttatttcacctcggtgcacgccggctgagtccgaaaagagagtcaatgaagggagatggattatcattagttcttgtaggttttgggttaggcggtgaagttaagagccatgttttgcgggcaggggtggatctcacaaagtatattctcaagggtgggaagaatttcaaagagccttcttaagggtgggggatattacggagtacattgatcagttagggtggggcaggaacaaatcacaatgatggaatgtaatcacttaaagctattttgacttcttttgtggatcttcagttacttcaggccatctgggtgtatacgtgcaagtcacaggagatgcgatggcttggcttgggctcagaggctggacattcctgccttcttatattaataagaaaaataaaatagtgttgaagtattggggcggtgaaaatttttggggggtggtatgaagagagaatgggcgatgtttctcagggctgcttcaagcgggattggggtggcgtgggaagctagagtgggagagattaagctgaagggagatcttgtggaaaggggtgatattgtggggatgttagaagaaacatttgtcatatagaattattggtgatgacctgcatacggttttggatggattgagaaactaaatggaaaaagagaaggagaaaaacaggtataaaaggtctaagaattgggaggacctaggacatctgattagagagtgcctaaggagattcagcatagtcctgccagcaaagattatttatttacttcaagagtttagagtggcagtttggggatggcaccaggagatatcagctgtgatggcttggagaaacagtgtaaactggcagtgtaaacaagaacagggcatgtatgagtagttgagaacggtgaataggagtatgactagagagaagatagtagggatggcaagtttttttggggcacagtctaagttggtctggtgtcaaatgagactggggcctaataaaaaggagcgtctatacaggagcttaaatgcgctgcaccttgcagcattctgacgacaggtctgacttctgagaagggaaagtggtaaaagtactttccagtcctttttaagttggtggctgagcttggtgaggtgtgtttttaaaagacctttagtcagttctacttttcttgaagacagaggaccataagggatataaaagttttactgaatactaagagcctgaaaaactgcttggctgatttgactactaaaggctggtctgttaccagactgtattgaggtgggaaggctaaactgaggaattatgtctgacagaagggaagaaatgactgtggtggccttctcagaccctgtaggaaaggcctctacttatctagtgaaagtgtctacttagactaagaggtattttagttatctgacttggggcatgttgagtaaagctaatttgccagtcctgggtgggggcaaatcttcaagcttgatgtgtagggaaaggagggggcctgaataattcctgaggagtagtagaatagcagatggaacactgagaagttatttccttggggatagatttccacaatggaaaggaaacgagaggttctaagaggagggatagtggcttgtactatagcatagcctgcctttgctggtgtgtggcgattaggcctggtggaactgccatcaataaatcaagtgtgatcagggtcaggaacaggaaagaaggaaatatggggaaatgggatgaatgtcaggtggatgagagagatagtcatgggggtcaggtgtggtatcaggaataatgtgggaggctggattgaagtctgtgccaggaacaatggtaattgtgggacttaacaaagagtgagtacagctgaaggagtcagggagcagaaagtatatgcatcaggtatgaggaagaaaatagattttggaagttatgagaaatgtagagagtgagttgagcatagtttgtgattttgagggcctctaaaagtattaaagcagtggcagccgctgcacacagacatgagggctaggctaaaacagtaaggtcaagttgtttggacagaaaggctacagggtgcagtcctggctcttgtgtaagaattctgacacacaaaccatgcctaggaaggaaaggagttgttgttttgtaagggattgaggtttggggagattaactggacacgatcagcagagagagcacgtgtgtttttccgagaattatgctgagataggtaacagatgaggatgaaatttgggcttgactgaagtaatggggtctgtctgtgaagccttgcggcagtacagcccaggtaatttgctgagcctgatgggtgtcagggtaagtccaagtgaaagggaagagaggctgggatgacgggtgcaaaggaataggaaagaaagcatgtttgagatccagaacagaataatgggtagcagagggaggtactgaggacaggagagtacatgggtttggcaccatggggtggataggcaaaacaatttggttgataaggcgcagattctggactaacttgtaagccttgtctggttttaggacaggtaaaatgggggaattgtaaggagagtttataggctttaaaaggccatgctgtagcaggtgagtgataacaggctttaatcctttcaaagcatgctgtgggatgggatcttgacattgagtggggtaaaagggtgattaggttttaatgagatggtaaggggtgcatgatcggtcaccaaggagggagtaggggtatcttatacttgtgggttaaggtggggggatacaagaggaggatgcaaaggaggctttggattgggaagaagggcggcaatgagatgcagctgtagtccaggaatagtcagggaagcagataattttgttaaaatatctcggcctaataagggaactgggcagagggggataactaaaaaagagtgcataaaagaatattgtctaagttggcaccagagctggggagttttaagaggtttagaagcctggctgtcaatacctacaacagttatggaggcaagggaaacaggcctttgaaaagaaagtaatgtggagtgggtagcctccgtattgattaagaaggggacggacttaccctccactgtgagagttaccaaaatctcggcgtctgtgatggtctacggggcttccgaggagatcaggcagcatcaatcttcagccgctaagccaaggagtcagtcagagagctttgggccagagttccaggggctctgggagtggctgccaggtgagttgaacagtccgatttccagtgggttcctgcacagatgggacatggcttaggaggaatcctggactgcaggcattccttggcctggtggtcagatttctggcacttatagcaagctcctgggggaggaggttctggaggaacgcctggcggctgcggttcaagcgtttggaagttcttgtgtgctggagatgtagctggggtttgtctcacagtggaggcaaggaattgcaactttttttttattattgtacaccttgaaggtgaggttaattaagtcctgttgtggggtttgagggccagattccaatttttggagttttatttaatgtcgggagcagtttgggtaataaaatgtatattgagaataagatggccttttgaccttttagggtttagggctgtaaagcgtctcagggttgctgccgaacgagccatgaactgggctgtgtttttatatttgatgaaaaagagcctaaacgcttctgatttgggataaagagaaaggagtattaaccttgactatgcctttggctccagccaccttttaaacagtaaattgctgggcaggtggagagggctagtaacagaacgaaagtgtaagctggaccaggtgtgaggagggaaggcgataaaaagattacaggatggaggagcagaggctgaggaagaattaggacctagctcggcctggcgaggaggggagaggtcagatgggtctgtagaaaaggaagattacaaagactcagcgacacttggggttgggactgaggggacaggtgggagggaaagaaagaagatttgggagcagttgcactgggcacagagactaggaagggactgatgtgtgaaagaatgcctggacatcaggcctcctcagaccatttgcccattctatgacaagaattatttagatcttgtagggtggaaagattgaaagtgccatttttgggctatttggaactactgtggagtttgtattggggtcaggcagcattgcagaagaaaataagacgcttagattttaggtcaggtgagagttgcagaggtttataagttcttaagaatacaggctaagggagaaaaaggaggaatggagggtggaaggttgcccatagtgagggaggcaagcccagagcaaagagagcatagagagagggagggaaggggttcaggggttctcaccctccagaaaagtgggaaaggggttgtagcgtggaaataagggattggggattcttgccacctagaaaagtgggacttgctgctaagggtgaaggagaaggggttgaggggtacttgcccctaccccagaaaagcagagaaggggtagagacacagaaggggttggggtacttgcccgtcccctagaaaagtgggacttgccactaagggtgaaggagaaggggttgaggggttcttgctcctgccccagaagagcagagaaggggtagagacacggagagaaggggttggggtacttgcccctcccccagaaaagcgggacttgccgctaagggtgaaggaccaaggcaggcgtccctgcatggtctgacacctttgaaacatgggtgaataatcagagaggtgggcctgcaatgattaaacaccaagggaagcctgccttcccagtccgtgaccggcgccggagttttgggtccacggataaaacgtgtctcctttgtatctaatagaaaatgaaaggaattgaaattaagagatgggagagattgaagtgtggtgccaagattgaaaggagaaagaggttggagggatagtgagagaagttggagagtaaaaagaggccgcttaccggaagtgaaattggtgagatgtttcttgggctggtgagtctgaggacctgagctcataggtggatctctctcacggagcaaagagcaggaggatgggggattgatctcctaagggaggtcccccgatccgagtcacggcaccaaatttcatgcccgtccatgtgaagagaccaccaaacaggctttgtgtgagcaacatggctgtttatttcaactgggtgcaggtgggctgagtctgaaaagagagtcagcaaagggagatggattaccattagttcttataggttttgggataggtggtgaagttgatagcaatgttttgcggacaggggtcgatctcacaaagtacattctcaagggtggggagaattacaaagaaacatcttaagggtgggggagattacaaagtacattgatcagatagggtggggaaggaacaaatcacaatggtagaatgtcatcagttaaggctattttgatgtcttttgtggatcttcagttacttcagaccatctggtgtatatgttcaagtcacaggggatgcgatggattggcttgggctcagaggcctgacactggccttccaggcaaagtcacccatttggcactcctccctggatggccctggttgtgggattgccgccagtcatgcctgggctctggcctctgctctgtcctccctcttgctctgcctgccctgtttctgagaagcctaggggcttcttggtctgcctcaatgtcttcaacccaaaagacttcccagtccatccgggagaaagttcctgggggtcggtgtcatgattgtttccctctccaaacctctttaagcatgattgggcaggtgtggtgatcctggagctctgggcttctatagctgtctgggacagggaagctttctgggtctctgtggcccaagtgatggctgcgtggtccgtccaggaagagcgggaggcaacccgaccattcctgacatttgccttctaggaaaggcagtgtggcatgccacctgcacttcctctctgattcttgagggccatcgggttcctctgctcctgggaaaagaggcttctagcgctgaatcttctggctgccacggatgtcagggagccaaagggactgggttttgctgggtgcaggggaggtggcatcacgggtacgtacccggtggcagggtgggggtgggagtggggtgaaatttgtggaaacctctcggcccctctggcaggcatccctgaatgtggcttggattcggtcgcaggccctgtctcgcaagttttcagctgcgcttggcttttcttcagctttgtggccgaggtctcccgtggcccacgggcgcacggctggacatcattgtccgtctcgccacgccccctacggcctcaaagacacccgctcactccatccgctcttgggcgacgtcagtgccacgggtggtcacactggctccatctcagactcgcctctgtctgtctttgcatgtgtcgtggaaagcagtgtcgggatgcccgagcccccgggccttggagatgaaggcaggccactgctccacccaggaaggagggaggcagtgggctcgtgggtcagttcattttccgccgacagcacgccttgcggccctggggatctttctgtgccccagcgagacccttcccgcctcactgcattgcaaccccattcccgatcacccggtgggatccatagtcggatctgaagaggagtccgcacagccaagccggcaccctgaagctcctcctccaccgggaaccgaagcagaagaccgatcaaggaggtcctgaggacaggactcctactggtccgaccctgggtctcccgcaggcccctctggcagtcctcttcccacccgccgccgcaagcgcgccaccgccgccaccgccgccccggtcccagcaacctgccgtgtcgccgccattttttaaagggtccgcagcctgcctctcccgagcgaggggagagtcggcctctccagtgcgcatgcgcgaggcccgagccgccacttgcgtcagtgatcaccaccgttgcaccggggtggattcctgagactgggccaagtaggagacctgtgtgaccgtgcgtcagagtcgtgcctgagaccagtcctggccagggcgttaacaggatggtctccggaggccgggattcgcggagggtcgaccagcagggagaagcctcaggaggaagaaacctcagacggatcgccggggaggcagcgcgggatcccagcctcaggtgtgcgcggacggtgtgcccgtgagtctccccaaaagtggtgcccttgtgatgtcgaggacaggtctgcccgtgtgcccgtgggctgctctttcacctctgggttgtagtcgcggagagcagaacccggcagcttcaggggctgcctggggctgggtgttacctgctgtatgtgtttgtgcttaggggtgtgtgtgtgtgtgtgtgtctgtgtgtctgtgtgcccacttatgtctctctctgatatctctctctctcgcttctcactctttccgtcgctctctgttactatctctgtccgtctgtgcgtgcgtgtttgctgggacacaggtgccctttgcgccggagggtggtttcttgcacatcagcctttcttgtggtcagcctctccccgggtctcttcctgcgtcgtgtggcccgttggcagtcgttttcccggcggttccagtttgggtttgtgaaggcctgggcaacgtgggcacctgcgtcggacccgcaggggttttcatcccctccctatcctgagcagcctctttgctgggatccagacgaacacaccccaaccaaggacgaaggactcagaggggctcattgtccaccagcaggagggtgcccacagatcttgaagaagacgcttctcactcctcttgccctttgccctccttgagaaatctagccacggctcgacacagagacggaggaggaagccggcaacgggatggggcaaacatctctgtgggtcagacgctggccttcgtggccaagtcaccggtttggcactcctccgcggatggccgtggtggtggcattgcggccaatcctgcctgggctctggcctctgctctgtcctccctcttgctccgcctgccctatttctgagaagcctaggggcttcttagtctggctcaatgtcttcaacccagaactcttcccagtacatccgggagaaagttcctgggggtcggtgtcatgattgtttccctctccaaacctctttcagcatgattgggcaggtgtggtgatcctggagctatgggcttccatagctgtctgggacggggaagctttctgagtctccgtgacccaagtgatggctgcgtggccggtccaggaagagcgggaggtaacccgaccgttcctgacatttgccttctaggaaaggtggtgtggcatgccacctgcacttcctctctgattcttgagggccatcgggttcctctgctcctggggaaggaggcttctagcgctgaatcttctggctgccatggatgtcagggagccaaagggactgggttttgctgggtgcaggggaggtggcgtcatgggtacctaccccgtggcggggtgggggtgggagtggggtgaaatttgtggaaacctctcggcccctctggcaggcatccctgaatgtggcttggattcggacgcgggccctgtctcgcaggttttcagctgcccttggcttttcttcagctttgtggctgacgtctcccgtggcccacgggcgcacgcctggacatcactgtccgtctcgtcgtcgccccctacggcctcaaagacacacgctgcctgcatgtgctcttgggggacgacagtgccacatgtggacacactggctccagctcggactcgcctctgtctctctttgcccgtgtcgccggaagccgcgtcgggatgccggagccctcgggccttggagatgaaggcaggcccctgctcctgccaggaaggagggaggcagcgggctcatgggtcggtgcctttgcagccaacagcacgccttgcggccctggggatcttcctgtgccccggcgagaccctttccgcctcactgcattggaaccccattcccgatcacccgctgggatccatcatcggaccccaagaggagtccgcgcagcccagccggcaccccgaagctcctccttcagcgggaaccgaagcagaagagcgatcaaggaggtcctcaccacaggactcctatgggtccgaccctgggtctcccgcaggcccctctggcagtcctcttcccacccgccgcctcgggctgcgccttcgccgccgccgccgcaacctccagcaccgccgccccaggccccgcagccgccgcgtcgccgccattttttaaagggtccgcagcctgactctgcgaagtaagggcgggtggagcgggggagtcggcctcgccagcgcgcatgcgcaaggcccgagccgccgcttgggtcacagtgaaagccaccgttgcccggggatgggtccctgacacttggggaagtaggagccctgtgtgatcgtgcgtctgagtctgggctgagaccagtcctggccagggcagttaccaggacggtctccggaggccgggattcgcggagggtccagcagcaggaagaaaccccaggaggaagaaacctcagacagatcgccggcgaggcagcgcgggatcccagcctcaggcgtgcgcggacggtgtgcgggtgagtctccccaaaagtggagcccttgtgatgacgagcacaggtccgcctgcgtgcccgtgggctgctctctcaccggtggctctcagtcgcggagagcagaacccggcagcttcaggggctgcctgcgggtgggtgttccctgctgtacgtgtgtgttcgtcatgggtgtgtgtgtgtgtgtgttggggggggtgcgtctgtgtgtgtgcgcgcgcagtgcctgtctgtgtgtcgacttctgtctctctctcacgtctctctctctctctctctctctctctctccctctccctctctcccttctcgctctttccgtggccctctctttctgtctctgtccgtctgtgtgtgcgtgcgcctcgggacacatgtgccctgtgcgccggagggtgggtttcttgcacgtcggcctttcttctggtcagcctctccccgcgtctctgcctgggtcgtgtggccggttggcagtcgtcgtcccggcggttccagtttgggggtctgtgaaggcctgggcaacgtgggcatcggcgtcggacccgcaggggttttcatcccctccccatccggagcagcctctttgctaggctggatccagacgagcgctccccaaccaaggacaacggcctcccaggcgctcatcgtccacccgcaggagggtgcccgcagagcttcaagaaggtggttgtcacgcctgtcgccctctgccctcatcgagaaatgtagccacagctcgacgcagggacggagaaggaagccggcaaggggatggggcaagcatgtctgtctctcaaaggctggccttcctggctgagtcacccgtttgacactcctccccggatgccggtggtggtggcatggcccccccgtatcctgcctgggctctggcctctgctctgacctccctcttgctgtgtctgccccgtctctgagaagcctggcggcttcttagtgtggctcagtgtcttccacaaagaagacttccccgtccatcagggagaaacctcgtggcggtccgcgtcatgcttgtttccctctccacacctctttctggatgattgggcagctgtggtgatcctggagctctgggcttccatacctgtgtgggacagggaagctctctcggtctccatggcccaagtgatggctgcacgctcggtccaggaagaggcggaggcaagcccaccgctcctgacattggccttctaggaaaggcggtgttgcatcccacctgcacttcctctctgattcttgagagccaaccgcttcctccgctcctggggaaagtgccttctagcaccgaatgttttggctgccacggatgtcagggagccaacgggactgggttttggctgggtgcaggggaggttgcgtcaggggtacctagccggcggcgggctgggggtggggtgtactttgtccaaacctctcggctcctctggcgggcctccctgaacgtggcgtggactcgcgcacaggccctgtctcgcaggttttcaggtgcgcttggcttttcctccgctttgtggggcaggtctccagtggccccccgggcgcacgcctggacatcactgtccgtctcgtcgtcgccccctacggcctcaaagacacacgctgcctgcatgtgctcttgggggacgacagtgccacatgtggacacactggctccagctcggactcgcctctgtctctctttgcccgtgtcgccggaagccgcctcgggttgccggagccctcgggccttggagatgaaggcaggcccctgctcctgccaggaaggagggaggcagtgggctcatgggtcggtgcctttgcagccgacagcacgccttgcggccctggggatcttcctgtgccccggcgagaccctttccgcctcactgcattggaaccccattcccgatcacccgctgggatccatcatcggaccccaagaggagtccgcgcagcccagccggcaccccgaagctcctccttcagcgggaaccgaagcagaagagcgttcaaggaggtcctcaccacaggactcctatgggtccgaccctgggtctcccgcaggcccctctggcagtcctcttcccacccgccgcctcgggctgcgccttcgccgccgccgccgcaacctccagcaccgccgccccaggccccgcagccgccgcgtcgccgccattttttaaagggtccgcagcctgactctgcggagtaagggggggtggagcgggggagtcggcctcgccagcgcgcatgcgcgaggcccgagccgccgcttgggtcacagtgaaagccaccgttgcccggggatgggtccctgacacttggggaagtaggagccctgtgtgatcgtgcgtctgagtctgggctgagaccagtcctggccagggcagttaccaggacggtctccggaggccgggattcgcggagggtccagcagcaggaagaaaccccaggaggaagaaacctcagacagatcgccggcgaggcagcgcgggatcccagcctcaggcgtgcgcggacggtgtgcgggtgagtctccccaaaagtggagcccttgtgatgacgagcacaggtccgcctgcgtgcccgtgggcggctctctcaccgctggctctcagtcgcggagagcagaacccggcagcttcaggggctgcctgcgggagggtgttccctgctgtacgtgtgtgttcgtcatgggtgtgtgtgtttgtgtgttggggggggtgcgtctgtgtgtgtgcgcgcgcagtgcctgtctgtgtgcggacttctgtctctctctcaggtctctctctctctctctctctcccttctcgctctttccgtggccctctctttctgtctctgtccgtctgtgtgtgcgtgcgcctcgggacacatgtgccctgtgcgccggagggtgggtttcttgcacgtcggcctttcttctggtcagcctctccccgcgtctctgcctgggtcgtgtggccggttggcagtcgtcgtcccggcggttccagtttgggggtctgtgaaggcctgggcaacgtgggcatcggcgtcggacccgcaggggttttcatcccctccccatccggagcagcctctttgctaggctggatccagacgagcgctccccaaccaaggacaacggcctcccaggcgctcatcgtccacccgcaggagggtgcccgcagagcttcaagaaggtggttgtcacgcctgtcgccctctgccctcatcgagaaatgtagccacagctcgacgcagggacggagaaggaagccggcaaggggatggggcaagcatgtctgtctctcaaaggctggccttcctggccgagtcacccgtttgacactcctccccggatgccggtggtggtggcatggcccccccgtatcctgcctgggctctggcctctgctctgacctccctcttgctgtgtctgccccgtctctgagaagcctggcggcttcttagtgtggctcagtgtcttccacaaagaagacttccccgtccatcagggagaaacctcgtggcggtccgcgtcatgcttgtttccctctccacacctctttctggatgattgggcagctgtggtgatcctggagctctgggcttccatacctgtgtgggacagggaagctctctcggtctccatggcccaagtgatggctgcacgctcggtccaggaagaggcggaggcaagcccaccgctcctgacattggccttctaggaaaggcggtgttgcatcccacctgcacttcctctctgattcttgagggccaaccgcttcctccgctcctggggaaagtgccttctagcaccgaatcttttggctgccacggatgtcagggagccaacgggactgggttttggctgggtgcaggggaggttgcgtcaggggaacctagccggcggcgggctgggggtggggtgtactttgtccaaacctctcggctcctctggcgggcctccctgaacgtggcgtggactcgcgcacaggccctgtctcgcaggttttcaggtgcgcttggcttttcctccgctttgtggggcaggtctccagtggccccccgggcgcacgcctggacatcactgtccgtctcgtcgtcgccccctacggcctcaaagacacacgctgcctgcatgtgctcttgggggacgacagtgccacatgtggacacactggctccagctcggactcgcctctgtctctctttgcccgtgtcgccggaagccgcctcgggttgccggagccctcgggccttggagatgaaggcaggcccctgctcctgccaggaaggagggaggcagtgggctcatgggtcggtgcctttgcagccgacagcacgccttgcggccctggggatcttcctgtgccccggcgagaccctttccgcctcactgcattggaaccccattcccgatcacacgctgggatccatcatcggaccccaagaggagtccgcgcagcccagccggcaccccgaagctcctccttcagtgggaaccgaagcagaagagcgatcaaggaggtcctcaccacaggactcatgggtccgaccatgggtctcccgcaggcccctctggcagtcctcttcccacccgccgcctcgggctgcgccttcgccgccgccgccgcaacctccagcaccgccgccccaggccccgcagccgccgcgtcgccgccattttttaaagggtccgcagcctgactctgcggagtaagggggggtggagcgggggagtcggcctcgccagcgcgcatgcgcgaggcccgagccgccgcttgggtcacagtgaaagccaccgttgcccggggatgggtccctgacacttggggaagtaggagccctgtgtgatcgtgcgtctgagtctgggctgagaccagtcctggccagggcagttaccaggacggtctccggaggccgggattcgcggagggtccagcagcaggaagaaaccccaggaggaagaaacctcagacagatcgccggcgaggcagcgcgggatcccagcctcaggcgtgcgcggacggtgtgcgggtgagtctccccaaaagtggagcccttgtgatgacgagcacaggtccgcctgcgtgcccgtgggctgctctctcaccggtggctctcagtcgcggagagcagaacccggcagcttcaggggctgcctgcgggagggtgttccctgctgtacgtgtgtgttcgtcatgggtgtgtgtgtgtgtgtgttggggggggtgcgtctgtgtgtgtgtctgtgtgtgtgcgcgcgcagtgcctgtctgtgtgccgacttctgtctctctctcacgtctctctctctctctctctctctctctgtctctctctctctctctctctctcccttctcgctctttccgtggccctctctttctgtctctgtccgtctgtgtgtgcgtgcgcctcgggacacatgtgccctgtgcgccggagggtgggtttcttgcacgtcggcctttcttctggtcagcctctccccgcgtctctgcctgggtcgtgtggccggttggcagtcgtcgtcccggcggttccagtttgggggtctgtgaaggcctgggcaacgtgggcatcggcgtcggacccgcaggggttttcatcccctccccatccggagcagcctctttgctaggctggatccagacgagcgctccccaaccaaggacaacggcctcccaggcgctcatcgtccacccgcaggagggtgcccgcagagcttcaagaaggtggttgtcacgcctgtcgccctctgccctcatcgagaaatgtagccacagctcgacgcagggacggagaaggaagccggcaaggggatggggcaagcatgtctgtctctcaaaggctggccttcctggccgagtcacccgtttgacactcctccccggatgccggtggtggtggcatggcccccccgtatcctgcctgggctctggcctctgctctcacctccctcttgctgtgtctgccccgtctctgagaagcctggcggcttcttagtgtggctcagtgtcttccacaaagaagacttccccgtccatcagggagaaacctcgtggcggtccgcgtcatgattgtttccctctccacacctctttctggatgattgggcagctgtggtgatcctggagctctgggcttccatacctgtgtgggacagggaagctctctcggtctccatggcccaagtgatggctgcacgctcggtccaggaagaggcggaggcaagcccaccgctcctgacattggccttctaggaaaggcggtgttgcatcccacctgcacttcctctctgattcttgagggccaaccgcttcctccgctcctggggaaagtgccttctagcaccgaatgttttggctgccacggatgtcagggagccaacgggactgggttttggctgggtgcaggggaggttgcgtcaggggtacctagccggcggcgggctgggggtggggtgtactttgtccaaacctctcggctcctctggcgggcctccctgaacgtggcgtggactcgcgcacaggccctgtctcgcaggttttcaggtgcgcttggcttttcctccgctttgtggggcaggtctccagtggccccccgggcgcacgcctggacatcactgtccgtctcgtcgtcgccccctacggcctcaaagacacacgctgcctgcatgtgctcttgggggacgacagtgccacatgtggacacactggctccagctcggactcgcctctgtctctctttgcccgtgtcgccggaagccgcctcgggttgccggagccctcgggccttggagatgaaggcaggcccctgctcctgccaggaaggagggaggcagtgggctcatgggtcggtgcctttgcagccgacagcacgccttgcggccctggggatcttcctgtgccccggcgagaccctttccgcctcactgcattggaaccccattcccgatcacccgctgggatccatcatcggaccccaagaggagtccgcgcagcccagccggcaccccgaagctcctccttcagtgggaaccgaagcagaagagcgatcaaggaggtcctcaccacaggactcctatgggtccgaccctgggtctcccgcaggcccctctggcagtcctcttcccacccgccgcctcgggctgcgccttcgccgccgccgccgcaacctccagcaccgccgccccaggccccgcagccgccgcgtcgccgccattttttaaagggtccgcagcctgactctgcggagtaagggggggtggagcgggggagtcggcctcgccagcgcgcatgcgcgaggcccgagccgccgcttgggtcacagtgaaagccaccgttgcccggggatgggtccctgacacttggggaagtaggagccctgtgtgatcgtgcgtctgagtctgggctgagaccagtcctggccagggcagttaccaggacggtctccggaggccgggattcgcggagggtccagcagcaggaagaaaccccaggaggaagaaacctcagacagatcgccggcgaggcagcgcgggatcccagcctcaggcgtgcgcggacggtgtgcgggtgagtctccccaaaagtggagcccttgtgatgacgagcacaggtccgcctgcgtgcccgtgggctgctctctcaccggtggctctcagtcgcggagagcagaacccggcagcttcaggggctgcctgcgggagggtgttccctgctgtacgtgtgtgttcgtcatgggtgtgtgtgtgtgtgtgttggggggggtgcgtctgtgtgtgtgtctgtgtgtgtgcgcgcgcagtgcctgtctgtgtgccgacttctgtctctctctcacgtctctctctctctctctctctctctctctctctctctctctctccctctccctctccctctctcccttctcgctctttccgtggccctctctttctgtctctgtccgtctgtgtgtgcgtgcgcctcgggacacatgtgccctgtgcgccggagggtgggtttcttgcacgtcggcctttcttctggtcagcctctccccgcgtctctgtctgggtcgtgtggccggttggcagtcgtcgtcccggcggttccagtttgggggtctgtgaaggcctgggcaacgtgggcatcggcgtcggacccgcaggggttttcatcccctccccatccggagcagcctctttgctaggctggatccagacgagcgctccccaaccaaggacaacggcctcccaggcgctcatcgtccacccgcaggagggtgcccgcagagcttcaagaaggtggttgtcacgcctgtcgccctctgccctcatcgagaaatgtagccacagctcgacgcagggacggagaaggaagccggcaaggggatggggcaagcatgtctgtctctcaaaggctggccttcctggccgagtcacccgtttgacactcctccccggatgccggtggtggtggcatggcccccccgtatcctgcctgggctctggcctctgctctgacctccctcttgctgtgtctgccccgtctctgagaagcctggcggcttcttagtgtggctcagtgtcttccacaaagaagacttccccgtccatcagggagaaacctcgtggcggtccgcgtcatgcttgtttccctctccacacctctttctggatgattgggcagctgtggtgatcctggagctctgggcttccatacctgtgtgggacagggaagctctctcggtctccatggcccaagtgatggctgcacgctcggtccaggaagaggcggaggcaagcccaccgctcctgacattggccttctaggaaaggcggtgttgcatcccacctgcacttcctctctgattcttgagggccaaccgcttcctccgctcctggggaaagtgccttctagcaccgaatcttttggctgccacggatgtcagggagccaacgggactgggttttggctgggtgcaggggaggttgcgtcaggggtacctagccggcggcgggctgggggtggggtgtactttgtccaaacctctcggctcctctggcgggcctccctgaacgtggcgtggactcgcgcacaggccctgtctcgcaggttttcaggtgcgcttggcttttcctccgctttgtggggcaggtctccagtggccccccgggcgcacgcctggacatcactgtccgtctcgtcgtcgccccctacggcctcaaagacacacgctgcctgcatgtgctcttgggggacgacagtgccacatgtggacacgctggctccagctcggactcgcctctgtctctctttgcccgtgtcgccggaagccgcctcgggttgccggagccctcgggccttggagatgaaggcaggcccctgctcctgccaggaaggagggaggcagtgggctcatgggtcggtgcctttgcagccgacagcacgccttgcggccctggggatcttcctgtgccccggcgagaccctttccgcctcactgcattggaaccccattcccgatcacccgctgggatccatcatcggaccccaagaggagtccgcgcagcccagccggcaccccgaagctcctccttcagtgggaaccgaagcagaagagcgatcaaggaggtcctcaccacaggactcatgggtccgaccatgggtctcccgcaggcccctctggcagtcctctccccacccgccgcctcgggctgcgccttcgccgccgccgccgcaacctccagcaccgccgccccaggccccgcagccgccgcgtcgccgccattttttaaagggtccgcagcctgactctgcggagtaagggggggtggagcgggggagtcggcctcgccagcgcgcatgcgcgaggcccgagccgccgcttgggtcacagtgaaagccaccgttgcccggggatgggtccctgacacttggggaagtaggagccctgtgtgatcgtacgtctgagtctgggctgagaccagtcctggccagggcagttaccaggacggtctccggaggccgggattcgcggagggtccagcagcaggaagaaaccccaggaggaagaaacctcagacagatcgccggcgaggcagcgcgggatcccagcctcaggcgtgcgcggacggtgtgcgggtgagtctccccaaaagtggagcccttgtgatgacgagcacaggtccgcctgcgtgcccgtgggctgctctctcaccggtggctctcagtcgcggagagcagaacccggcagcttcaggggctgcctgcgggagggtgttccctgctgtacgtgtgtgttcgtcatgggtgtgtgtgtgtgtgtgttgggggggtgcgtctgtgtgtgtgtctgtgtgtgtgcgcgcgcagtgcctgtctgtgtgccgacttctgtctctctctcacgtctctctctctctctctctctctctctctctctctctctctgtctcccttctcgctctttccgtggccctctctttctgtctctgtccgtctgtgtgtgcgtgcgcctcgggacacatgtgccctgtgcgccggagggtgggtttcttgcacgtcggcctttcttctggtcagcctctccccgcgtctctgcctgggtcgtgtggccggttggcagtcgtcgtcccggcggttccagtttgggggtctgtgaaggcctgggcaacgtgggcatcggcgtcggacccgcaggggttttcatcccctccccatccggagcagcctctttgctaggctggatccagacgagcgctccccaaccaaggacaacggcctcccaggcgctcatcgtccacccgcaggagggtgcccgcagagcttcaagaaggtggttgtcacgcctgtcgccctctgccctcatcgagaaatgtagccacagctcgacgcagggacggagaaggaagccggcaaggggatggggcaagcatgtctgtctctcaaaggctggccttcctggccgagtcacccgtttgacactcctccccggatgccggtggtggtggcatggcccccccgtatcctgcctgggctctggcctctgctctgacctccctcttgctgtgtctgccccgcctctgagaagcctggcggcttcttagtgtggctcagtgtcttccacaaagaagacttccccgtccatcagggagaaacctcgtggcggtccgcgtcatgcttgtttccctctccacacctctttctggatgattgggcagctgtggtgatcctggagctctgggcttccatacctgtgtgggacagggaagctctctcggtctccatggcccaagtgatggctgcacgctcggtccaggaagaggcggaggcaagcccaccgctcctgacattggccttctaggaaaggcggtgttgcatcccacctgcacttcctctctgattcttgagggccaaccgcttcctccgctcctggggaaagtgccttctagcaccgaatcttttggctgccacggatgtcagggagccaacgggactgggttttggctgggtgcaggggaggttgcgtcaggggtacctagccggcggcgggctgggggtggggtgtactttgtccaaacctctcggctcctctggcgggcctccctgaacgtggcgtggactcgcgcacaggccctgtctcgcaggttttcaggtgcgcttggcttttcctccgctttgtggggcaggtctccagtggccccccgggcgcacgcctggacatcactgtccgtctcgtcgtcgccccctacggcctcaaagacacacgctgcctgcatgtgctcttgggggacgacagtgccacatgtggacacactggctccagctcggactcgcctctgtctctctttgcccgtgtcgccggaagccgcctcgggttgccggagccctcgggccttggagatgaaggcaggcccctgctcctgccaggaaggagggaggcagtgggctcatgggtcggtgcctttgcagccgacagcacgccttgcggccctggggatcttcctgtgccccggcgagaccctttccgcctcactgcattggaaccccattcccgatcacccgctgggatccatcatcggaccccaagaggagtccgcgcagcccagccggcaccccgaagctcctccttcagtgggaaccgaagcagaagagcgatcaaggaggtcctcaccacaggactcatgggtccgaccatgggtctcccgcaggcccctctggcagtcctcttcccacccgccgcctcgggctgcgccttcgccgccgccgccgcaacctccagcaccgccgccccaggccccgcagccgccgcgtcgccgccattttttaaagggtccgcagcctgactctgcggagtaagggggggtggagcgggggagtcggcctcgccagcgcgcatgcgcgaggcccgagccgccgcttgggtcacagtgaaagccaccgttgcccggggatgggtccctgacacttggggaagtaggagccctgtgtgatcgtgcgtctgagtctgggctgagaccagtcctggccagggcagttaccaggacggtctccggaggccgggattcgcggagggtccagcagcaggaagaaaccccaggaggaagaaacctcagacagatcgccggcgaggcagcgcgggatcccagcctcaggcgtgcgcggacggtgtgcgggtgagtctccccaaaagtggagcccttgtgatgacgagcacaggtccgcctgcgtgcccgtgggctgctctctcaccggtggctctcagtcgcggagagcagaacccggcagcttcaggggctgcctgcgggagggtgttccctgctgtacgtgtgtgttcgtcatgggtgtgtgtgtgtgtgtgttggggggggtgcgtctgtgtgtgtgtctgtgtgtgtgcgcgcgcagtgcctgtctgtgtgccgacttctgtctctctctcacgtctctctctctctctctctctctctctctctctccctctccctctctcccttctcgctctttccgtggccctctctttctgtctctgtccgtctgtgtgtgcgtgcgcctcgggacacatgtgccctgtgcgccggagggtgggtttcttgcacgtcggcctttcttctggtcagcctctccccgcgtctctgtctgggtcgtgtggccggttggcagtcgtcgtcccggcggttccagtttgggggtctgtgaaggcctgggcaacgtgggcatcggcgtcggacccgcaggggttttcatcccctccccatccggagcagcctctttgctaggctggatccagacgagcgctccccaaccaaggacaacggcctcccaggcgctcatcgtccacccgcaggagggtgcccgcagagcttcaagaaggtggttgtcacgcctgtcgccctctgccctcatcgagaaatgtagccacagctcgacgcagggacggagaaggaagccggcaaggggatggggcaagcatgtctgtctctcaaaggctggccttcctggccgagtcacccgtttgacactcctccccggatgccggtggtggtggcatggcccccccgtatcctgcctgggctctggcctctgctctgacctccctcttgctgtgtctgccccgtctctgagaagcctggcggcttcttagtgtggctcagtgtcttccacaaagaagacttccccgtccatcagggagaaacctcgtggcggtccgcgtcatgattgtttccctctccacacctctttctggatgattgggcagctgtggtgatcctggagctctgggcttccatacctgtgtgggacagggaagctctctcggtctccatggcccaagtgatggctgcacgctcggtccaggaagaggcggaggcaagcccaccgctcctgacattggccttctaggaaaggcggtgttgcatcccacctgcacttcctctctgattcttgagggccaaccgcttcctccgctcctggggaaagtgccttctagcaccgaatcttttggctgccacggatgtcagggagccaacgggactgggttttggctgggtgcaggggaggttgcgtcaggggtacctagccggcggcgggctgggggtggggtgtactttgtccaaacctctcggctcctctggcgggcctccctgaacgtggcgtggactcgcgcacaggccctgtctcgcaggttttcaggtgcgcttggcttttcctccgctttgtggggcaggtctccagtggccccccgggcgcacgcctggacatcactgtccgtctcgtcgtcgccccctacggcctcaaagacacacgctgcctgcatgtgctcttgggggacgacagtgccacatgtggacacgctggctccagctcggactcgcctctgtctctctttgcccgtgtcgccggaagccgcctcgggttgccggagccctcgggccttggagatgaaggcaggcccctgctcctgccaggaaggagggaggcagtgggctcatgggtcggtgcctttgcagccgacagcacgccttgcggccctggggatcttcctgtgccccggcgagaccctttccgcctcactgcattggaaccccattcccgatcacccgctgggatccatcatcggaccccaagaggagtccgcgcagcccagccggcaccccgaagctcctccttcagtgggaaccgaagcagaagagcgatcaaggaggtcctcaccacaggactcctatgggtccgaccctgggtctcccgcaggcccctctggcagtcctcttcccacccgccgcctcgggctgcgccttcgccgccgccgccgcaacctccagcaccgccgccccaggccccgcagccgccgcgtcgccgccattttttaaagggtccgcagcctgactctgcggagtaagggggggtggagcgggggagtcggcctcgccagcgcgcatgcgcgaggcccgagccgccgcttgggtcacagtgaaagccaccgttgcccggggatgggtccctgacacttggggaagtaggagccctgtgtgatcgtgcgtctgagtctgggctgagaccagtcctggccagggcagttaccaggacggtctccggaggccgggattcgcggagggtccagcagcaggaagaaaccccaggaggaagaaacctcagacagatcgccggcgaggcagcgcgggatcccagcctcaggcgtgcgcggacggtgtgcgggtgagtctccccaaaagtggagcccttgtgatgacgagcacaggtccgcctgcgtgcccgtgggctgctctctcaccggtggctctcagtcgcggagagcagaacccggcagcttcaggggctgcctgcgggagggtgttccctgctgtacgtgtgtgttcgtcatgggtgtgtgtgtgtgtgtgttggggggggtgcgtctgtgtgtgtgtctgtgtgtgtgcgcgcgcagtgcctgtctgtgtgccgacttctgtctctctctcacgtctctctctctctctctctctctctctctctctctctgtctcccttctcgctctttccgtggccctctctttctgtctctgtccgtctgtgtgtgcgtgcgcctcgggacacatgtgccctgtgcgccggagggtgggtttcttgcacgtcggcctttcttctggtcagcctctccccgcgtctctgcctgggtcgtgtggccggttggcagtcgtcgtcccggcggttccagtttgggggtctgtgaaggcctgggcaacgtgggcatcggcgtcggacccgcaggggttttcatcccctccccatccggagcagcctctttgctaggctggatccagacgagcgctccccaaccaaggacaacggcctcccaggcgctcatcgtccacccgcaggagggtgcccgcagagcttcaagaaggtggttgtcacgcctgtcgccctctgccctcatcgagaaatgtagccacagctcgacgcagggacggagaaggaagccggcaaggggatggggcaagcatgtctgtctctcaaaggctggccttcctggccgagtcacccgtttgacactcctccccggatgccggtggtggtggcatggcccccccgtatcctgcctgggctctggcctctgctctgacctccctcttgctgtgtctgccccgcctctgagaagcctggcggcttcttagtgtggctcagtgtcttccacaaagaagacttccccgtccatcagggagaaacctcgtggcggtccgcgtcatgattgtttccctctccacacctctttctggatgattgggcagctgtggtgatcctggagctctgggcttccatacctgtgtgggacagggaagctctctcggtctccatggcccaagtgatggctgcacgctcggtccaggaagaggcggaggcaagcccaccgctcctgacattggccttctaggaaaggcggtgttgcatcccacctgcacttcctctctgattcttgagggccaaccgcttcctccgctcctggggaaagtgccttctagcaccgaatcttttggctgccacggatgtcagggagccaacgggactgggttttggctgggtgcaggggaggttgcgtcaggggtacctagccggcggcgggctgggggtggggtgtactttgtccaaacctctcggctcctctggcgggcctccctgaacgtggcgtggactcgcgcacaggccctgtctcgcaggttttcaggtgcgcttggcttttcctccgctttgtggggcaggtctccagtggccccccgggcgcacgcctggacatcactgtccgtctcgtcgtcgccccctacggcctcaaagacacacgctgcctgcatgtgctcttgggggacgacagtgccacatgtggacacactggctccagctcggactcgcctctgtctctctttgcccgtgtcgccggaagccgcctcgggttgccggagccctcgggccttggagatgaaggcaggcccctgctcctgccaggaaggagggaggcagtgggctcatgggtcggtgcctttgcagccgacagcacgccttgcggccctggggatcttcctgtgccccggcgagaccctttccgcctcactgcattggaaccccattcccgatcacccgctgggatccatcatcggaccccaagaggagtccgcgcagcccagccggcaccccgaagctcctccttcagtgggaaccgaagcagaagagcgatcaaggaggtcctcaccacaggactcatgggtccgaccctgggtctcccgcaggcccctctggcagtcctctccccacccgccgcctcgggctgcgccttcgccgccgccgccgcaacctccagcaccgccgccccaggccccgcagccgccgcgtcgccgccattttttaaagggtccgcagcctgactctgcggagtaagggggggtggagcgggggagtcggcctcgccagcgcgcatgcgcgaggcccgagccgccgcttgggtcacagtgaaagccaccgttgcccggggatgggtccctgacacttggggaagtaggagccctgtgtgatcgtacgtctgagtctgggctgagaccagtcctggccagggcagttaccaggacggtctccggaggccgggattcgcggagggtccagcagcaggaagaaaccccaggaggaagaaacctcagacagatcgccggcgaggcagcgcgggatcccagcctcaggcgtgcgcggacggtgtgcgggtgagtctccccaaaagtggagcccttgtgatgacgagcacaggtccgcctgcgtgcccgtgggctgctctctcaccggtggctctcagtcgcggagagcagaacccggcagcttcaggggctgcctgcgggagggtgttccctgctgtacgtgtgtgttcgtcatgggtgtgtgtgtgtgtgtgttgggggggtgcgtctgtgtgtgtgtctgtgtgtgtgcgcgcgcagtgcctgtctgtgtgccgacttctgtctctctctcacgtctctctctctctctctctctctctctctctctctctctctctgtctcccttctcgctctttccgtggccctctctttctgtctctgtccgtctgtgtgtgcgtgcgcctcgggacacatgtgccctgtgcgccggagggtgggtttcttgcacgtcggcctttcttctggtcagcctctccccgcgtctctgcctgggtcgtgtggccggttggcagtcgtcgtcccggcggttccagtttgggggtctgtgaaggcctgggcaacgtgggcatcggcgtcggacccgcaggggttttcatcccctccccatccggagcagcctctttgctaggctggatccagacgagcgctccccaaccaaggacaacggcctcccaggcgctcatcgtccacccgcaggagggtgcccgcagagcttcaagaaggtggttgtcacgcctgtcgccctctgccctcatcgagaaatgtagccacagctcgacgcagggacggagaaggaagccggcaaggggatggggcaagcatgtctgtctctcaaaggctggccttcctggccgagtcacccgtttgacactcctccccggatgccggtggtggtggcatggcccccccgtatcctgcctgggctctggcctctgctctgacctccctcttgctgtgtctgccccgtctctgagaagcctggcggcttcttagtgtggctcagtgtcttccacaaagaagacttccccgtccatcagggagaaacctcgtggcggtccgcgtcatgattgtttccctctccacacctctttctggatgattgggcagctgtggtgatcctggagctctgggcttccatacctgtgtgggacagggaagctctctcggtctccatggcccaagtgatggctgcacgctcggtccaggaagaggcggaggcaagcccaccgctcctgacattggccttctaggaaaggcggtgttgcatcccacctgcacttcctctctgattcttgagggccaaccgcttcctccgctcctggggaaagtgccttctagcaccgaatcttttggctgccacggatgtcagggagccaacgggactgggttttggctgggtgcaggggaggttgcgtcaggggtacctagccggcggcgggctgggggtggggtgtactttgtccaaacctctcggctcctctggcgggcctccctgaacgtggcgtggactcgcgcacaggccctgtctcgcaggttttcaggtgcgcttggcttttcctccgctttgtggggcaggtctccagtggccccccgggcgcacgcctggacatcactgtccgtctcgtcgtcgccccctacggcctcaaagacacacgctgcctgcatgtgctcttgggggacgacagtgccacatgtggacacactggctccagctcggactcgcctctgtctctctttgcccgtgtcgccggaagccgcctcgggttgccggagccctcgggccttggagatgaaggcaggcccctgctcctgccaggaaggagggaggcagtgggctcatgggtcggtgcctttgcagccgacagcacgccttgcggccctggggatcttcctgtgccccggcgagaccctttccgcctcactgcattggaaccccattcccgatcacccgctgggatccatcatcggaccccaagaggagtccgcgcagcccagccggcaccccgaagctcctccttcagtgggaaccgaagcagaagagcgatcaaggaggtcctcaccacaggactcctatgggtccgaccctgggtctcccgcaggcccctctggcagtcctcttcccacccgccgcctcgggctgcgccttcgccgccgccgccgcaacctccagcaccgccgccccaggccccgcagccgccgcgtcgccgccattttttaaagggtccgcagcctgactctgcggagtaagggggggtggagcgggggagtcggcctcgccagcgcgcatgcgcgaggcccgagccgccgcttgggtcacagtgaaagccaccgttgcccggggatgggtccctgacacttggggaagtaggagccctgtgtgatcgtgcgtctgagtctgggctgagaccagtcctggccagggcagttaccaggacggtctccggaggccgggattcgcggagggtccagcagcaggaagaaaccccaggaggaagaaacctcagacagatcgccggcgaggcagcgcgggatcccagcctcaggcgtgcgcggacggtgtgcgggtgagtctccccaaaagtggagcccttgtgatgacgagcacaggtccgcctgcgtgcccgtgggctgctctctcaccggtggctctcagtcgcggagagcagaacccggcagcttcaggggctgcctgcgggagggtgttccctgctgtacgtgtgtgttcgtcatgggtgtgtgtgtgtgtgtgttggggggggtgcgtctgtgtgtgtgtctgtgtgtgtgcgcgcgcagtgcctgtctgtgtgccgacttctgtctctctctcacgtctctctctctctctctctctctctctctctctctctctctgtctcccttctcgctctttccgtggccctctctttctgtctctgtccgtctgtgtgtgcgtgcgcctcgggacacatgtgccctgtgcgccggagggtgggtttcttgcacgtcggcctttcttctggtcagcctctccccgcgtctctgcctgggtcgtgtggccggttggcagtcgtcgtcccggcggttccagtttgggggtctgtgaaggcctgggcaacgtgggcatcggcgtcggacccgcaggggttttcatcccctccccatccggagcagcctctttgctaggctggatccagacgagcgctccccaaccaaggacaacggcctcccaggcgctcatcgtccacccgcaggagggtgcccgcagagcttcaagaaggtggttgtcacgcctgtcgccctctgccctcatcgagaaatgtagccacagctcgacgcagggacggagaaggaagccggcaaggggatggggcaagcatgtctgtctctcaaaggctggccttcctggccgagtcacccgtttgacactcctccccggatgccggtggtggtggcatggcccccccgtatcctgcctgggctctggcctctgctctgacctccctcttgctgtgtctgccccgcctctgagaagcctggcggcttcttagtgtggctcagtgtcttccacaaagaagacttccccgtccatcagggagaaacctcgtggcggtccgcgtcatgattgtttccctctccacacctctttctggatgattgggcagctgtggtgatcctggagctctgggcttccatacctgtgtgggacagggaagctctctcggtctccatggcccaagtgatggctgcacgctcggtccaggaagaggcggaggcaagcccaccgctcctgacattggccttctaggaaaggcggtgttgcatcccacatgcacttcctctctgattcttgagggccaaccgcttcctccgctcctggggaaagtgccttctagcaccgaatcttttggctgccacggatgtcagggagccaacgggactgggttttggctgggtgcaggggaggttgcgtcaggggtacctagccggcggcgggctgggggtggggtgtactttgtccaaacctcttggctcctctggcgggcctccctgaacgtggcgtggactcgcgcacaggccctgtctcgcaggttttcaggtgcgcttggcttttcctccgctttgtggggcaggtctccagtggccccccgggcgcacgcctggacatcactgtccgtctcgtcgtcgccccctacggcctcaaagacacacgctgcctgcatgtgctcttgggggacgacagtgccacatgtggacacactggctccagctcggactcgcctctgtctctctttgcccgtgtcgccggaagccgcctcgggttgccggagccctcgggccttggagatgaaggcaggcccctgctcctgccaggaaggagggaggcagtgggctcatgggtcggtgcctttgcagccgacagcacgccttgcggccctggggatcttcctgtgccccggcgagaccctttccgcctcactgcattggaaccccattcccgatcacccgctgggatccatcatcggaccccaagaggagtccgcgcagcccagccggcaccccgaagctcctccttcagtgggaaccgaagcagaagagcgatcaaggaggtcctcaccacaggactcatgggtccgaccctgggtctcccgcaggcccctctggcagtcctctccccacccgccgcctcgggctgcgccttcgccgccgccgccgcaacctccagcaccgccgccccaggccccgcagccgccgcgtcgccgccattttttaaagggtccgcagcctgactctgcggagtaagggggggtggagcgggggagtcggcctcgccagcgcgcatgcgcgaggcccgagccgccgcttgggtcacagtgaaagccaccgttgcccggggatgggtccctgacacttggggaagtaggagccctgtgtgatcgtacgtctgagtctgggctgagaccagtcctggccagggcagttaccaggacggtctccggaggccgggattcgcggagggtccagcagcaggaagaaaccccaggaggaagaaacctcagacagatcgccggcgaggcagcgcgggatcccagcctcaggcgtgcgcggacggtgtgcgggtgagtctccccaaaagtggagcccttgtgatgacgagcacaggtccgcctgcgtgcccgtgggctgctctctcaccggtggctctcagtcgcggagagcagaacccggcagcttcaggggctgcctgcgggagggtgttccctgctgtacgtgtgtgttcgtcatgggtgtgtgtgtgtgtgtgttgggggggtgcgtctgtgtgtgtgtctgtgtgtgtgcgcgcgcagtgcctgtctgtgtgccgacttctgtctctctctcacgtctctctctctctctctctctctctctctctctctgtctcccttctcgctctttccgtggccctctctttctgtctctgtccgtctgtgtgcgtgcgcctcgggacacatgtgccctgtgcgccggagggtgggtttcttgcacgtcggcctttcttctggtcagcctctccccgcgtctctgcctgggtcgtgtggccggttggcagtcgtcgtcccggcggttccagtttgggggtctgtgaaggcctgggcaacgtgggcatcggcgtcggacccgcaggggttttcatcccctccccatccggagcagcctctttgctaggctggatccagacgagcgctccccaaccaaggacaacggcctcccaggcgctcatcgtccacccgcaggagggtgcccgcagagcttcaagaaggtggttgtcacgcctgtcgccctctgccctcatcgagaaatgtagccacagctcgacgcagggacggagaaggaagccggcaaggggatggggcaagcatgtctgtctctcaaaggctggccttcctggccgagtcacccgtttgacactcctccccggatgccggtggtggtggcatggcccccccgtatcctgcctgggctctggcctctgctctgacctccctcttgctgtgtctgccccgcctctgagaagcctggcggcttcttagtgtggctcagtgtcttccacaaagaagacttccccgtccatcagggagaaacctcgtggcggtccgcgtcatgattgtttccctctccacacctctttctggatgattgggcagctgtggtgatcctggagctctgggcttccatacctgtgtgggacagggaagctctctgggtctccatggcccaagtgatggctgcacgctcggtccaggaagaggcggaggcaagcccaccgctcctgacattggccttctaggaaaggcggtgttgcatcccacctgcacttcctctctgattcttgagggccaaccgcttcctccgctcctggggaaagtgccttctagcaccgaatcttttggctgccacggatgtcagggagccaacgggactgggttttggctgggtgcaggggaggttgcgtcaggggtacctagccggcggcgggctgggggtggggtgtactttgtccaaacctctcggctcctctggcgggcctccctgaacgtggcgtggactcgcgcacaggccctgtctcgcaggttttcaggtgcgcttggcttttcctccgctttgtggggcaggtctccagtggccccccgggcgcacgcctggacatcactgtccgtctcgtcgtcgccccctacggcctcaaagacacacgctgcctgcatgtgctcttgggggacgacagtgccacatgtggacacactggctccagctcggactcgcctctgtctctctttgcccgtgtcgccggaagccgcctcgggttgccggagccctcgggccttggagatgaaggcaggcccctgctcctgccaggaaggagggaggcagtgggctcatgggtcggtgcctttgcagccgacagcacgccttgcggccctggggatcttcctgtgccccggcgagaccctttccgcctcactgcattggaaccccattcccgatcacccgctgggatccatcatcggaccccaagaggagtccgcgcagcccagccggcaccccgaagctcctccttcagtgggaaccgaagcagaagagcgatcaaggaggtcctcaccacaggactcctatgggtccgaccctgggtctcccgcaggcccctctggcagtcctcttcccacccgccgcctcgggctgcgccttcgccgccgccgccgcaacctccagcaccgccgccccaggccccgcagccgccgcgtcgccgccattttttaaagggtccgcagcctgactctgcggagtaagggggggtggagcgggggagtcggcctcgccagcgcgcatgcgcgaggcccgagccgccgcttgggtcacagtgaaagccaccgttgcccggggatgggtccctgacacttggggaagtaggagccctgtgtgatcgtgcgtctgagtctgggctgagaccagtcctggccagggcagttaccaggacggtctccggaggccgggattcgcggagggtccagcagcaggaagaaaccccaggaggaagaaacctcagacagatcgccggcgaggcagcgcgggatcccagcctcaggcgtgcgcggacggtgtgcgggtgagtctccccaaaagtggagcccttgtgatgacgagcacaggtccgcctgcgtgcccgtgggctgctctctcaccggtggctctcagtcgcggagagcagaacccggcagcttcaggggctgcctgcgggagggtgttccctgctgtacgtgtgtgttcgtcatgggtgtgtgtgtgtgtgtgttggggggggtgcgtctgtgtgtgtgtctgtgtgtgtgcgcgcgcagtgcctgtctgtgtgccgacttctgtctctctctcacgtctctctctctctctctctctctctctgtctcccttctcgctctttccgtggccctctctttctgtctctgtccgtctgtgtgtgcgtgcgcctcgggacacatgtgccctgtgcgccggagggtgggtttcttgcacgtcggcctttcttctggtcagcctctccccgcgtctctgcctgggtcgtgtggccggttggcagtcgtcgtcccggcggttccagtttgggggtctgtgaaggcctgggcaacgtgggcatcggcgtcggacccgcaggggttttcatcccctccccatccggagcagcctctttgctaggctggatccagacgagcgctccccaaccaaggacaacggcctcccaggcgctcatcgtccacccgcaggagggtgcccgcagagcttcaagaaggtggttgtcacgcctgtcgccctctgccctcatcgagaaatgtagccacagctcgacgcagggacggagaaggaagccggcaaggggatggggcaagcatgtctgtctctcaaaggctggccttcctggccgagtcacccgtttgacactcctccccggatgccggtggtggtggcatggcccccccgtatcctgcctgggctctggcctctgctctgacctccctcttgctgtgtctgccccgcctctgagaagcctggcggcttcttagtgtggctcagtgtcttccacaaagaagacttccccgtccatcagggagaaacctcgtggcggtccgcgtcatgattgtttccctctccacacctctttctggatgattgggcagctgtggtgatcctggagctctgggcttccatacctgtgtgggacagggaagctctctgggtctccatggcccaagtgatggctgcacgctcggtccaggaagaggcggaggcaagcccaccgctcctgacattggccttctaggaaaggcggtgttgcatcccacctgcacttcctctctgattcttgagggccaaccgcttcctccgctcctggggaaagtgccttctagcaccgaatcttttggctgccacggatgtcagggagccaacgggactgggttttggctgggtgcaggggaggttgcgtcaggggtacctagccggcggcgggctgggggtggggtgtactttgtccaaacctctcggctcctctggcgggcctccctgaacgtggcgtggactcgcgcacaggccctgtctcgcaggttttcaggtgcgcttggcttttcctccgctttgtggggcaggtctccagtggccccccgggcgcacgcctggacatcactgtccgtctcgtcgtcgccccctacggcctcaaagacacacgctgcctgcatgtgctcttgggggacgacagtgccacatgtggacacgctggctccagctcggactcgcctctgtctctctttgcccgtgtcgccggaagccgcctcgggttgccggagccctcgggccttggagatgaaggcaggcccctgctcctgccaggaaggagggaggcagtgggctcatgggtcggtgcctttgcagccgacagcacgccttgcggccctggggatcttcctgtgccccggcgagaccctttccgcctcactgcattggaaccccattcccgatcacccgctgggatccatcatcggaccccaagaggagtccgcgcagcccagccggcaccccgaagctcctccttcagtgggaaccgaagcagaagagcgatcaaggaggtcctcaccacaggactcctatgggtccgaccctgggtctcccgcaggcccctctggcagtcctcttcccacccgccgcctcgggctgcgccttcgccgccgccgccgcaacctccagcaccgccgccccaggccccgcagccgccgcgtcgccgccattttttaaagggtccgcagcctgactctgcggagtaacggggggtggagcgggggagtcggcctcgccagcgcgcatgcgcgaggcccgagccgccgcttgggtcacagtgaaagccaccgttgcccggggatgggtccctgacacttggggaagtaggagccctgtgtgatcgtgcgtctgagtctgggctgagaccagtcctggccagggcagttaccaggacggtctccggaggccgggattcgcggagggtccagcagcaggaagaaaccccaggaggaagaaacctcagacagatcgccggcgaggcagcgcgggatcccagcctcaggcgtgcgcggacggtgtgcgggtgagtctccccaaaagtggagcccttgtgatgacgagcacaggtccgcctgcgtgcccgtgggctgctctctcaccggtggctctcagtcgcggagagcagaacccggcagcttcaggggctgcctgcgggagggtgttccctgctgtacgtgtgtgttcgtcatgggtgtgtgtgtgtgtgtgttggggggggtgcgtctgtgtgtgtgtctgtgtgtgtgcgcgcgcagtgcctgtctgtgtgccgacttctgtctctctctcacgtctctctctctctctctctctctctctctctctctctctgtctcccttctcgctctttccgtggccctctctttctgtctctgtccgtctgtgtgtgcgtgcgcctcgggacacatgtgccctgtgcgccggagggtgggtttcttgcacgtcggcctttcttctggtcagcctctccccgcgtctctgcctgggtcgtgtggccggttggcagtcgtcgtcccggcggttccagtttgggggtctgtgaaggcctgggcaacgtgggcatcggcgtcggacccgcaggggttttcatcccctccccatccggagcagcctctttgctaggctggatccagacgagcgctccccaaccaaggacaacggcctcccaggcgctcatcgtccacccgcaggagggtgcccgcagagcttcaagaaggtggttgtcacgcctgtcgccctctgccctcatcgagaaatgtagccacagctcgacgcagggacggagaaggaagccggcaaggggatggggcaagcatgtctgtctctcaaaggctggccttcctggccgagtcacccgtttgacactcctccccggatgccggtggtggtggcatggcccccccgtatcctgcctgggctctggcctctgctctgacctccctcttgctgtgtctgccccgcctctgagaagcctggcggcttcttagtgtggctcagtgtcttccacaaagaagacttccccgtccatcagggagaaacctcgtggcggtccgcgtcatgattgtttccctctccacacctctttctggatgattgggcagctgtggtgatcctggagctctgggcttccatacctgtgtgggacagggaagctctctgggtctccatggcccaagtgatggctgcacgctcggtccaggaagaggcggaggcaagcccaccgctcctgacattggccttctaggaaaggcggtgttgcatcccacctgcacttcctctctgattcttgagggccaaccgcttcctccgctcctggggaaagtgccttctagcaccgaatcttttggctgccacggatgtcagggagccaacgggactgggttttggctgggtgcaggggaggttgcgtcaggggtacctagccggcggcgggctgggggtggggtgtactttgtccaaacctctcggctcctctggcgggcctccctgaacgtggcgtggactcgcgcacaggccctgtctcgcaggttttcaggtgcgcttggcttttcctccgctttgtggggcaggtctccagtggccccccgggcgcacgcctggacatcactgtccgtctcgtcgtcgccccctacggcctcaaagacacacgctgcctgcatgtgctcttgggggacgacagtgccacatgtggacacgctggctccagctcggactcgcctctgtctctctttgcccgtgtcgccggaagccgcctcgggttgccggagccctcgggccttggagatgaaggcaggcccctgctcctgccaggaaggagggaggcagtgggctcatgggtcggtgcctttgcagccgacagcacgccttgcggccctggggatcttcctgtgccccggcgagaccctttccgcctcactgcattggaaccccattcccgatcacccgctgggatccatcatcggaccccaagaggagtccgcgcagcccagccggcaccccgaagctcctccttcagtgggaaccgaagcagaagagcgatcaaggaggtcctcaccacaggactcctatgggtccgaccctgggtctcccgcaggcccctctggcagtcctcttcccacccgccgcctcgggctgcgccttcgccgccgccgccgcaacctccagcaccgccgccccaggccccgcagccgccgcgtcgccgccattttttaaagggtccgcagcctgactctgcggagtaagggggggtggagcgggggagtcggcctcgccagcgcgcatgcgcgaggcccgagccgccgcttgggtcacagtgaaagccaccgttgcccggggatgggtccctgacacttggggaagtaggagccctgtgtgatcgtgcgtctgagtctgggctgagaccagtcctggccagggcagttaccaggacggtctccggaggccgggattcgcggagggtccagcagcaggaagaaaccccaggaggaagaaacctcagacagatcgccggcgaggcagcgcgggatcccagcctcaggcgtgcgcggacggtgtgcgggtgagtctccccaaaagtggagcccttgtgatgacgagcacaggtccgcctgcgtgcccgtgggctgctctctcaccggtggctctcagtcgcggagagcagaacccggcagcttcaggggctgcctgcgggagggtgttccctgctgtacgtgtgtgttcgtcatgggtgtgtgtgtgtgtgtgttggggggggtgcgtctgtgtgtgtgtctgtgtgtgtgcgcgcgcagtgcctgtctgtgtgccgacttctgtctctctctcacgtctctctctctctctctctctctctctctctctctctctgtctcccttctcgctctttccgtggccctctctttctgtctctgtccgtctgtgtgtgcgtgcgcctcgggacacatgtgccctgtgcgccggagggtgggtttcttgcacgtcggcctttcttctggtcagcctctccccgcgtctctgcctgggtcgtgtggccggttggcagtcgtcgtcccggcggttccagtttgggggtctgtgaaggcctgggcaacgtgggcatcggcgtcggacccgcaggggttttcatcccctccccatccggagcagcctctttgctaggctggatccagacgagcgctccccaaccaaggacaacggcctcccaggcgctcatcgtccacccgcaggagggtgcccgcagagcttcaagaaggtggttgtcacgcctgtcgccctctgccctcatcgagaaatgtagccacagctcgacgcagggacggagaaggaagccggcaaggggatggggcaagcatgtctgtctctcaaaggctggccttcctggccgagtcacccgtttgacactcctccccggatgccggtggtggtggcatggcccccccgtatcctgcctgggctctggcctctgctctgacctccctcttgctgtgtctgccccgtctctgagaagcctggcggcttcttagtgtggctcagtgtcttccacaaagaagacttccccgtccatcagggagaaacctcgtggcggtccgcgtcatgattgtttccctctccacacctctttctggatgattgggcagctgtggtgatcctggagctctgggcttccatacctgtgtgggacagggaagctctctcggtctccatggcccaagtgatggctgcacgctcggtccaggaagaggcggaggcaagcccaccgctcctgacattggccttctaggaaaggcggtgttgcatcccacctgcacttcctctctgattcttgagggccaaccgcttcctccgctcctggggaaagtgccttctagcaccgaatcttttggctgccacggatgtcagggagccaacgggactgggttttggctgggtgcaggggaggttgcgtcaggggtacctagccggcggcgggctgggggtggggtgtactttgtccaaacctctcggctcctctggcgggcctccctgaacgtggcgtggactcgcgcacaggccctgtctcgcaggttttcaggtgcgcttggcttttcctccgctttgtggggcaggtctccagtggccccccgggcgcacgcctggacatcactgtccgtctcgtcgtcgccccctacggcctcaaagacacacgctgcctgcatgtgctcttgggggacgacagtgccacatgtggacacactggctccagctcggactcgcctctgtctctctttgcccgtgtcgccggaagccgcctcgggttgccggagccctcgggccttggagatgaaggcaggcccctgctcctgccaggaaggagggaggcagtgggctcatgggtcggtgcctttgcagccgacagcacgccttgcggccctggggatcttcctgtgccccggcgagaccctttccgcctcactgcattggaaccccattcccgatcacccgctgggatccatcatcggaccccaagaggagtccgcgcagcccagccggcaccccgaagctcctccttcagtgggaaccgaagcagaagagcgatcaaggaggtcctcaccacaggactcctatgggtccgaccctgggtctcccgcaggcccctctggcagtcctcttcccacccgccgcctcgggctgcgccttcgccgccgccgccgcaacctccagcaccgccgccccaggccccgcagccgccgcgtcgccgccattttttaaagggtccgcagcctgactctgcggagtaagggggggtggagcgggggagtcggcctcgccagcgcgcatgcgcgaggcccgagccgccgcttgggtcacagtgaaagccaccgttgcccggggatgggtccctgacacttggggaagtaggagccctgtgtgatcgtgcgtctgagtctgggctgagaccagtcctggccagggcagttaccaggacggtctccggaggccgggattcgcggagggtccagcagcaggaagaaaccccaggaggaagaaacctcagacagatcgccggcgaggcagcgcgggatcccagcctcaggcgtgcgcggacggtgtgcgggtgagtctccccaaaagtggagcccttgtgatgacgagcacaggtccgcctgcgtgcccgtgggctgctctctcaccggtggctctcagtcgcggagagcagaacccggcagcttcaggggctgcctgcgggagggtgttccctgctgtacgtgtgtgttcgtcatgggtgtgtgtgtgtgtgtgttgggggggtgcgtctgtgtgtgtgtctgtgtgtgtgcgcgcgcagtgcctgtctgtgtgccgacttctgtctctctctcacgtctctctctctctctctctctctctctctctctctctgtctcccttctcgctctttccgtggccctctctttctgtctctgtccgtctgtgtgtgcgtgcgcctcgggacacatgtgccctgtgcgccggagggtgggtttcttgcacgtcggcctttcttctggtcagcctctccccgcgtctctgcctgggtcgtgtggccggttggcagtcgtcgtcccggcggttccagtttgggggtctgtgaaggcctgggcaacgtgggcatcggcgtcggacccgcaggggttttcatcccctccccatccggagcagcctctttgctaggctggatccagacgagcgctccccaaccaaggacaacggcctcccaggcgctcatcgtccacccgcaggagggtgcccgcagagcttcaagaaggtggttgtcacgcctgtcgccctctgccctcatcgagaaatgtagccacagctcgacgcagggacggagaaggaagccggcaaggggatggggcaagcatgtctgtctctcaaaggctggccttcctggccgagtcacccgtttgacactcctccccggatgccggtggtggtggcatggcccccccgtatcctgcctgggctctggcctctgctctgacctccctcttgctgtgtctgccccgtctctgagaagcctggcggcttcttagtgtggctcagtgtcttccacaaagaagacttccctgtccatcagggagaaacctcgtggcggtccgcgtcatgattgtttccctctccacacctctttctggatgattgggcagctgtggtgatcctggagctctgggcttccatacctgtgtgggacagggaagctctctcggtctccatggcccaagtgatggctgcacgctcggtccaggaagaggcggaggcaagcccaccgctcctgacattggccttctaggaaaggcggtgttgcatcccacctgcacttcctctctgattcttgagggccaaccgcttcctccgctcctggggaaagtgccttctagcaccgaatcttttggctgccacggatgtcagggagccaacgggactgggttttggctgggtgcaggggaggttgcgtcaggggtacctagccggcggcgggctgggggtggggtgtactttgtccaaacctctcggctcctctggcgggcctccctgaacgtggcgtggactcgcgcacaggccctgtctcgcaggttttcaggtgcgcttggcttttcctccgctttgtggggcaggtctccagtggccccccgggcgcacgcctggacatcactgtccgtctcgtcgtcgccccctacggcctcaaagacacacgctgcctgcatgtgctcttgggggacgacagtgccacatgtggacacactggctccagctcggactcgcctctgtctctctttgcccgtgtcgccggaagccgcctcgggttgccggagccctcgggccttggagatgaaggcaggcccctgctcctgccaggaaggagggaggcagtgggctcatgggtcggtgcctttgcagccgacagcacgccttgcggccctggggatcttcctgtgccccggcgagaccctttccgcctcactgcattggaaccccattcccgatcacccgctgggatccatcatcggaccccaagaggagtccgcgcagcccagccggcaccccgaagctcctccttcagtgggaaccgaagcagaagagcgatcaaggaggtcctcaccacaggactcatgggtccgaccatgggtctcccgcaggcccctctggcagtcctctccccacccgccgcctcgggctgcgccttcgccgccgccgccgcaacctccagcaccgccgccccaggccccgcagccgccgcgtcgccgccattttttaaagggtccgcagcctgactctgcggagtaagggggggtggagcgggggagtcggcctcgccagcgcgcatgcgcgaggcccgagccgccgcttgggtcacagtgaaagccaccgttgcccggggatgggtccctgacacttggggaagtaggagccctgtgtgatcgtgcgtctgagtctgggctgagaccagtcctggccagggcagttaccaggacggtctccggaggccgggattcgcggagggtccagcagcaggaagaaaccccaggaggaagaaacctcagacagatcgccggcgaggcagcgcgggatcccagcctcaggcgtgcgcggacggtgtgcgggtgagtctccccaaaagtggagcccttgtgatgacgagcacaggtccgcctgcgtgcccgtgggctgctctctcaccggtggctctcagtcgcggagagcagaacccggcagcttcaggggctgcctgcgggagggtgttccctgctgtacgtgtgtgttcgtcatgggtgtgtgtgtgtgtgtgttggggggggtgcgtctgtgtgtgtgcgcgcgcagtgcctgtctgtgtgccgacttctgtctctctctcacgtctctctctctctctctctctctctctctctctgtctcccttctcgctctttccgtggccctctctttctgtctctgtccgtctgtgtgtgcgtgcgcctcgggacacatgtgccctgtgcgccggagggtgggtttcttgcacgtcggcctttcttctggtcagcctctccccgcgtctctgcctgggtcgtgtggccggttggcagtcgtcgtcccggcggttccagtttgggggtctgtgaaggcctgggcaacgtgggcatcggcgtcggacccgcaggggttttcatcccctccccatccggagcagcctctttgctaggctggatccagacgagcgctccccaaccaaggacaacggcctcccaggcgctcatcgtccacccgcaggagggtgcccgcagagcttcaagaaggtggttgtcacgcctgtcgccctctgccctcatcgagaaatgtagccacagctcgacgcagggacggagaaggaagccggcaaggggatggggcaagcatgtctgtctctcaaaggctggccttcctggccgagtcacccgtttgacactcctccccggatgccggtggtggtggcatggcccccccgtatcctgcctgggctctggcctctgctctgacctccctcttgctgtgtctgccccgtctctgagaagcctggcggcttcttagtgtggctcagtgtcttccacaaagaagacttccccgtccatcagggagaaacctcgtggcggtccgcgtcatgattgtttccctctccacacctctttctggatgattgggcagctgtggtgatcctggagctctgggcttccatacctgtgtgggacagggaagctctctcggtctccatggcccaagtgatggctgcacgctcggtccaggaagaggcggaggcaagcccaccgctcctgacattggccttctaggaaaggcggtgttgcatcccacctgcacttcctctctgattcttgagggccaaccgcttcctccgctcctggggaaagtgccttctagcaccgaatcttttggctgccacggatgtcagggagccaacgggactgggttttggctgggtgcaggggaggttgcgtcaggggtacctagccggcggcgggctgggggtggggtgtactttgtccaaacctctcggctcctctggcgggcctccctgaacgtggcgtggactcgcgcacaggccctgtctcgcaggttttcaggtgcgcttggcttttcctccgctttgtggggcaggtctccagtggccccccgggcgcacgcctggacatcactgtccgtctcgtcgtcgccccctacggcctcaaagacacacgctgcctgcatgtgctcttgggggacgacagtgccacatgtggacacactggctccagctcggactcgcctctgtctctctttgcccgtgtcgccggaagccgcctcgggttgccggagccctcgggccttggagatgaaggcaggcccctgctcctgccaggaaggagggaggcagtgggctcatgggtcggtgcctttgcagccgacagcacgccttgcggccctggggatcttcctgtgccccggcgagaccctttccgcctcactgcattggaaccccattcccgatcacccgctgggatccatcatcggaccccaagaggagtccgcgcagcccagccggcaccccgaagctcctccttcagtgggaaccgaagcagaagagcgatcaaggaggtcctcaccacaggactcatgggtccgaccatgggtctcccgcaggcccctctggcagtcctcttcccacccgccgcctcgggctgcgccttcgccgccgccgccgcaacctccagcaccgccgccccaggccccgcagccgccgcgtcgccgccattttttaaagggtccgcagcctgactctgcggagtaagggggggtggagcgggggagtcggcctcgccagcgcgcatgcgcgaggcccgagccgccgcttgggtcacagtgaaagccaccgttgcccggggatgggtccctgacacttggggaagtaggagccctgtgtgatcgtacgtctgagtctgggctgagaccagtcctggccagggcagttaccaggacggtctccggaggccgggattcgcggagggtccagcagcaggaagaaaccccaggaggaagaaacctcagacagatcgccggcgaggcagcgcgggatcccagcctcaggcgtgcgcggacggtgtgcgggtgagtctccccaaaagtggagcccttgtgatgacgagcacaggtccgcctgcgtgcccgtgggctgctctctcaccggtggctctcagtcgcggagagcagaacccggcagcttcaggggctgcctgcgggagggtgttccctgctgtacgtgtgtgttcgtcatgggtgtgtgtgtgtgtgtgttgggggggtgcgtctgtgtgtgtgtctgtgtgtgtgcgcgcgcagtgcctgtctgtgtgccgacttctgtctctctctcacgtctctctctctctctctctctctctctctctctctgtctcccttctcgctctttccgtggccctctctttctgtctctgtccgtctgtgtgtgcgtgcgcctcgggacacatgtgccctgtgcgccggagggtgggtttcttgcacgtcggcctttcttctggtcagcctctccccgcgtctctgcctgggtcgtgtggccggttggcagtcgtcgtcccggcggttccagtttgggggtctgtgaaggcctgggcaacgtgggcatcggcgtcggacccgcaggggttttcatcccctccccatccggagcagcctctttgctaggctggatccagacgagcgctccccaaccaaggacaacggcctcccaggcgctcatcgtccacccgcaggagggtgcccgcagagcttcaagaaggtggttgtcacgcctgtcgccctctgccctcatcgagaaatgtagccacagctcgacgcagggacggagaaggaagccggcaaggggatggggcaagcatgtctgtctctcaaaggctggccttcctggccgagtcacccgtttgacactcctccccggatgccggtggtggtggcatggcccccccgtatcctgcctgggctctggcctctgctctgacctccctcttgctgtgtctgccccgcctctgagaagcctggcggcttcttagtgtggctcagtgtcttccacaaagaagacttccccgtccatcagggagaaacctcgtggcggtccgcgtcatgattgtttccctctccacacctctttctggatgattgggcagctgtggtgatcctggagctctgggcttccatacctgtgtgggacagggaagctctctcggtctccatggcccaagtgatggctgcacgctcggtccaggaagaggcggaggcaagcccaccgctcctgacattggccttctaggaaaggcggtgttgcatcccacctgcacttcctctctgattcttgagggccaaccgcttcctccgctcctggggaaagtgccttctagcaccgaatcttttggctgccacggatgtcagggagccaacgggactgggttttggccgggtgcaggggaggttgcgtcaggggtacctagccggcggcgggctgggggtggggtgtactttgtccaaacctctcggctcctctggcgggcctccctgaacgtggcgtggactcgcgcacaggccctgtctcgcaggttttcaggtgcgcttggcttttcctccgctttgtggggcaggtctccagtggccccccgggcgcacgcctggacatcactgtccgtctcgtcgtcgccccctacggcctcaaagacacacgctgcctgcatgtgctcttgggggacgacagtgccacatgtggacacgctggctccagctcggactcgcctctgtctctctttgcccgtgtcgccggaagccgcgtcgggatgccggagccctcgggccttggagatgaaggcaggcccctgctcctgccaggaaggagggaggcagtgggctcatgggtcggtgcctttgcagccgacagcacgccttgcggccctggggatcttcctgtgccccggcgagaccctttccgcctcactgcattggaaccccattcccgatcacccgctgggatccatcgtcggaccccaagaggagtccgcgcagcccagccggcaccccgaagctcctccttcagcgggaacggaagcagaagagcgatcaaggaggtcctcaccacaggactcctatgggtccgaccctgggtctcccgcaggcccctctggcagtcctcttcccacccgtcgcctcgggctgcgccgccgccgccgccgccgcaacctccagcaccgccgccccaggccccgcagccgccgcgtcgccgccattttttaaagggtccgcagcctgactctgcggagtaagggggggtggagcggggggagtcggcctcgccagcgcgcaggcgcgaggcccgagccgccgcttgggtcacagtgaaagccaccgttgcccggggatgggtccctgacacttggggaagtaggagccctgtgtgatcgtgcgtctgagtctgggctgagaccagtcctggccagggcagttaccaggacggtctccggaggccgggattcgcggagggtccagcagcaggaagaaaccccaggaggaagaaacctcagacagatcgccggcgaggcagcgcgggatcccagcctctggcgtgcgcggacggtgtgcgggtgagtctccccaaaagtggagcccttgtgatgacgagcacaggtccgcctgtgtgcccgtgggctgctctctcaccggtggctcgtagtcgcgtaaagcagaagtagcagtttcagcggctgacactaagaacaatgcatactggcaaagtgaggtgtctcacatctttaatcccagcagtttgggaggctgaggcggatggatcacttgaggtcaggggatcacaccagcctaaccaacatgatgaaactccgcgtctactaaaaaaaagtaccagacagttagcgcggtgtggtggcatatgcctgtaaatcccagctatttgggaggctgaggcaggagaatcggttgaaccagtgtggccgaggttgcagtgagtgtagattgcaccactgcactctagcctgggtaacaagcacaaaactctgtctcaaaaaaaaaaaaaaaattatcagtgcagagttaggccagattcattttcagagtaggagggaatttcaaattatgggtgaaatgtcccaactgccggaaggtgaaagtgttctgtgatgtaaaatttaggtcacactctataaagcttctccttattctatgtgtgaacagctagtctgtatcttcacctatgcatatttaaaaatcaaccttacgaaggctcttggccaccataatccttcctaccctgtagcaagagcccagcctcagactatgtttccttctgcctccgagtgcaatgccttcccccgagtctccaaggtaccaaaccggtcaggggcagctgagacagctctacttgtacgagtcctccccaagcccttgaaatcacaggcatctctgctgtccctgccctttatccacatcactgaacaattaagcacacacatctgtgtagttttatttaaactgttccatgtgtgtttgtttacaattaacaacatgaatgactgcagtatggatgcagcagaaaggaatgctgagggaggactccagttggaatgagccacttttccaggactaggaatgaactttccccagtaccaacaaggcagcctccagggcaagaaatggtaacagaatccatcctgttgacagtcaagatggaattacagagaattctcacctcttttttgactctcaggtggaaacccccttcccatggggtgaagcgcagtctgctccagagacccactgttagggtcggggatgtcacagaaattaacagggcagccaattcccatccagaggggcccaggatgaccccgaaccctctagctcagccccaagctcgggccagggagtgaagcctttgtccccaagcaacagagtgagggtctgtctctaacccggtgggctccagtgaaaggaaaatggcctggaggtgcccacaggagggcgccctagttctgagacaggtctacggctcccagactgcgtccccatgagtaacagagggacacgcagaggggcatactgagtgcctataggggactcacagactgcagatgcacgctgcggatccagaagccggtcaggtaatgaggtgcagaggtgtggggaagacctgggtgcttccctgggtgccaaccagcctaacccgccggggccaccaaacagaagtgcttctgacattaacgcgacacacagaaggtgtgtagggtgggtagtggaagtgaccgcagaggcctctggggattgtagttttggagctagagaggcgggcaagcagttggcttcgcccacacggtgtgcctctcacatctgcacagcgcacacaaccaagcttaggagccgactgttaagatgccccagtgacacggacaagtttctcctctgcaacccaatgagagctgctgaccacgagagcatcgcgggaccgccaaaggattctggaaaatgtggtcccgggtggccagtgtgcgctgaccttcacctgaaggtgagctgagctcaccatgcaagtctccaccctggggtgcccttccccaagcagatgccaggttggggcagaagcagttcagggagaagcgatgcgctcctgggactgccggtttggggggcaacatcggccctgtgtcccctagagtaggagggtgtaccaggatggggaaccccaaggccgttttcagggagaacaagattggcttgaggcaaactcccggaatggagatggggagagtctggtcgcatttccccaggagtttaggggatgaaggctggacttgggtgaacagcaaaagatcccctggtgatagtggtggtgaggatcagaggcttgagccagaaattcccgaggtgtttgtttgttttgttttttttgagacagagtcttgatctgtctcccaggatgtagtgcaatggcatgctcttggctcattgcaacctccgcctcccaggttcaagcgattctcctgcctcagcctcccaagtagctgagattataggcacctgccactgtgcccacctaaattttttttgtttttttgtatttttagtagagacgatgtttcaccacattgcccagcctggtctcgaactcctgacctcaagtgatccacctgcctcggcctcccaaagtgctgggattacaggcatgagcccccacacccagctcatttttatcttttaacttaaaggtttttatttttctctatttttactcttacaggtacggcttgaaggaaacttctggagggtggggtggtgttgaagagaaggcacaattgtcaccattttgttcaacatgggcgttttctttgtgcattgatttgcatttttaaaggtattccattaaaaatatgtttatctattttaatgttttttttggtgcccctttaaattctctatccacagtcctgagccttaatacgaagtgagggcctggcctctgggcatcaagcagccagaaagtcccttaggagctttctctgaattgttgaattgtgactgatcttttcctttcctgacttccttaatatccacaatttcctcgtaaccatccccccaaagccacacccacaaggcacctccaagacctatcatgaagcagatattcaaagattatttgtaaatcttcacaccccaccccttccagaatgtcttccaacatcccttcgcctggagaaataaaacacaaggtttgcatgttgagtatcagcctctcccattgggtgggtgtttaggaaaaagaatcagccaagagccctattccagcccaggtaaatgactttgccaaagatttaatatccacaaatgtacaatgctcactgggaaccaaagtcaggcatggggctgggctttaaggagcacaaacaaaaaggagggactagaaaacttcagaaaggtattggtgggggatgttgcggggggacaggggacagcgaggatgtgggatcccgagatcatccaaatccctatgtgtagacatatgtgtataaaggcctttaagagactcaggctgatggggtatctgtaataaatcaaacataatataacagcacgtcaagtgataaggggactctggaaaaacaagcagcaaaaggagcagtatcaaactccacagaaattcacaaacatcaagacaccaagaaagctgcattcatttaaatcaaggtgacaggctgggctctgtagctccagcctgtaatcctagcactttgggaggccaaggtgggcagatcatttgaggttcaagaccagcctggccattatggtgaaagctcctctctactaaaaatacaaaaattagctgggcatgttggtgggtgcctgtaatcccagctaaagaggctgaggcaggagaatcactctgaacctgggaggcagaggttgtagtgagcagagatcacgccattgcactccggcctcggggacagaaccaaactccatctcaagtaaatcaataaatcaaaggtgacagttactgagtgatgcgggccaggtacaatgatataccttcatctggattaccctcgtgaatctgaatcacttgtgtgatatctgtgctttaacgagtcctatttcccatactcttagctggcttgagatgtgaaaatccacctaaattataaacagagtgaaaaaaaaaaaaaaaaaactagtgatgtccttccagggaacatgtctagttaaaattaacatagataaaaatcggcaaaaagatattttaaaaaatcttttgaaattaaaagccatataaaccactgtgtcaatgatgaattaaaagaagaaactgacctgcaaaccaggaaatacatggaaagaagcaatagtgaaaatgcttcagatctaaacctgtggaatgaggctacctcagtgtccaaaaatatcatcacttaaatatagtgccaaggggtggggtgtggtgactcacccctgtaatcccagtattttgggaggccaaggtgggcggatcacttgaggtcaagagttcgagaccaacctggctgacatggtgaaatgccgtctctactaaaaatacaaaaattagctgggtgtggtggcaggcacccataatcccagctactcaggaggctgaggaaagagaactgcttgagcccgggaaccggaggttgcagtgagctgagatggcaccactgtactacagcctgggtgacagagcgagactctgtctcaaaaacaaaaaatttccaatgaataaactacctagcaagacttatagaatgagactaaaaccatggctggaggaaaacttttagcctgaaagtagcctatgacttagaaattaaggcaaaaaactaaggagtaagaagttacccttcaggttagaaaaccaacagcataacaggaaatgagacagggaagaaataatcagatggggctgagatgggggcttatggggatgaaggaggcaggaagagcatgtgaagtttgtgcataaagtcactccctaaggacagtccctgggaggaaggtgggtgcacaatgatcgagctagatgtagaaggtctagaaggcaatcctggagggtacattcaggggttgacagcagataagaaaacaggagggaaagtcaagcgtggagcctttcctgtccccagcatggaagacagcaggagctggtgagtgaaagtgataaacagccttctcatcacaaaaaaagtcaagtacttgaggtaacggataggttaatttgattctcattccacactgtattgaaaaatcacaacatcattttataccccataaatatatacaatttagaagatacataaaaatcagcaaaaaaaaataaactattctttgaaatatttttcaaacatgcaatttatggggtacaacctaattcgtctatatatatatatatatatatgttttttaaacagggagtcaataaacacagcaaacagccccttgggagggagataaggaaaatggccataatgtgcccttagaaagacacagcatttaaatccatgcatgtgagaactccagggttcaaggtaagaccaggtcagtgaagaacagccggcttatcacctatagccacaggatggcaccaacacccactgctccagcctgagctggccagagagagaaaacattcaagaaaagctgggacttcccagaaggcctgagacctgcaggtcccacactgaagtccagtgagggaggaaggtatgatatgaggtgaaaaaaataccatagaggtgtagctgaaatgaaacatttaatagttattaaatagtcattgtacttcaggtaaaagtaggtaaaatgacagaaaacgagacgaatgagccagacaccacagatatgtaatgatggacaatgacctgatgtggagtgttcacccacacatgcagactttatatgttcacataaacatttatctgcatgcatcaccccatagagatgtttacacaaactgcactgacactgtgaagtcaacgaggagataaagtaaaaatcaaatagttatggagagggttgatctgtttagtgggaaacccttcagaacacgcacacagcatctcccctcccttctgaataccatccatagcctgcagtagatggcaaatcacagcctgggccacccttcccagaatgtcccaaacatggacatgcagaccacagaactcaccagatactcaagatgggtggtgccgggctctgaaagacatgcttcaagtaagagggactagaaaactctgccagggagcaagagggatcggggattccaggaggatccaggggcctgtgcaaagagcaagcagtgagcagacgtgtgtgtcagtgattcggtggcatgaactcaacaccatctaatacagcagctcacatttctgtgtgcatcagactcacctggggacttgttaaatacagattgttgggtctcactcctagagtttcttcttcagtattctagggagcagcctgtgaatctgtatttccagcatgattttcaggtgctattgatactgttggtccaaggaccacactatgatctaatttagcaccaggttaggggaggaactaaggagcaaagaagcaacagaagaagggacctgaagcctgtaggtgcttctctgtaaactcctcaaacataaaagccttcaagacattcaaagagcatttacagcatcatgtctacaaatacaaggcaccacgcagggagtgctccatcaagtagaagagcccactgagtgtccctctcttagtccgtttgtgttgctataacagaataccacagactgggtgatttataagcaagagttcacttggtttacggttctgaacactgggaaagtgaggggcctgcatctggtgaaggtctcactgtgccgtcctatggtggaaggtggaagggcaagagagtgaccacatgtgagaggggggagggggaaagagaaagggaaggaagccaacctcatccttttatcaggaaccccctcccaagataactaacccactctagcttcatccattcatgagggcagagccttcatgacctaatcacctcttaaaggttccactggtcaacactgttgcattaggggttgagtttccaacacatgaactttggggaacacattcaaaccacagcagtcctcatgtaaaccttccagaaaacctgtgtgcctggcactctggaatccctcttttccaccccttcccactgcaactctaacatcgtgtcccctcatcattttccattcgagcataggaaagaacacaatcactacacccatttttgatgaacctttcctacattaaaataattctatcacttagaaatttgcaaaaataaattttcatttttgatatgagcgaatatgaattttttttttttttttttttttttgagaaggagtcttgctctgtggcccaggctggaatgaagtggcaagatctcagctcactgcaatctctgcccccggggtcatgcgattctcctgcctcagccttccaagtagctgggattacaggcgtgcaacaccacacccggctaattttgtatttttaatagagatggggttttcccttgttggccaggatggtctcgaacccctgacctcaggtgatgcgcccgccttggactctcaaagtgctgggattacaggcatgagccactatgcctggccctgaatatgaaattctgtattagtttaatgaaatatctaaaatatatagaaaataattaccaaaaatgttcaatgatgcaaagcaacacatacagtgagatattacatcctaaaatatatagacataaatatgttatttaaaaaatcaagcagaaacataaggggctctatacacaccttttaaaataagctttctggccgggtgcagtggctgatgcctgtaatctcacactttgggaggccgaggcgggcgtatcacctgaggtcaggggttcgagaccagcctggccaacatggtgaaaccccatctctactaaaaatacaaaaattagctgggcatggtggtgggcacctgtaatcccagctactggagaggctgaggtagagagaactgcttgaacccaggaggcagaggttgcaggggtccaagatgtgccactgtactccagc[140 bp omitted]tggtgaaaccctgtctccatgaaaaatacaaaaaattagccaggtgtggtggcgggcgcctgtagtcacagctactcaggaggctgagggaggagaatggcgtgaacctgggaggtggagcttgcagtgagcagagattgcgccactgcactccagcctgggcaacagagcgagactccatctcaaaaaaataaaattaattataataataaaataaaataagctttctaggttgggcacagtggctcacccctgtaatcccagcactttgggaagctgaggcaggcagatcacttgaggtcaggagttcaagaccagcctagccaaaatggcaaaaaactgtctctactaaaaagacaaaaattagccaggcatggtggtgcacatctgtaatcccgggtactcgggaggctgaggcaggagaatcacttgaatctggaaggcagaggttgtagtgagctgagattgcaccactgcactccagactggttgccataggaagactgtgtctcaaaaaaaaaaaaaaagatttctagtttaacgctagaattaatttgaaattctgtcaagaaagaggtactcaaaaaacatgaaaactatgtaagtcactaatgtatcaaagaaaacaatcattcttgtattgcaaataaatacccaaccaagacaaaaaggcacgtcacgtgttatgggaaaagactgaaatgagggtgagaggaaaactgtgacccttgaatgtaagacagaaaaaaatcagcgcaggatgttaaggaattggaaataattctccatattaaagaattacaagagacagaaagagaggagagagggacacgatagtcacagactgcaggggtgtggggtagatgggaataaaggaggcagagagagcagtggggatgtacataaaatcaccctccagagctgtgctgtccaataaggcagccacttgccacatgtggctgctgagcacttgaaagatggctagtccaacctgagaaatgctgtaagtggaaaacacattttaaaaaaattctgaatactcagtataaaagaaagaatgggccagtgtggtggctcacatctgtaatcccagcactttggaaggccaaggcgggaggactgcttgagccagaagtttgagactggactgggcaacatagcaagacctcatctcttcagaaaaaaaaaaaattaggccgagtgcagtggctcatgcctgtaatcccaacactttgggaagccaaggtgggtggatcacttcagctctggagttcaagaccagcctggacaacatgccgaaaccctgtcttaacaaaaaaatacaaaaattattcaggcgtggtggcacatgtttttggtcccagctacttgggaggctgaggtgggaggatcatttcagccccggagatcgaggctgcagtgagccgagattgtgccactgcactccagcccggctgacagagtgagaccctgtctttaaaaaaaaaaaaaaactagcgtggcatggtggtgtgtgcctgtagtccgaatactaggaagactgaggcaggaggatctcaagcccaggagtctgaaactgcaatgagctatgctggtgccactgcattccagcctggaccacaaagcaagaccctgtctcaaagaaaagaaagactgtaagctatctcattaataatttttattttgataagatgttgaagtgatattttggataatgctaacattttaggtgaaataaaactaatttcacctgtttctttgtaaccttttttttttttttgagatggagtctccctctgtcgcccaggctggagtgcagtggcgctatctcggctcactgcaagctctgcctaccgggttcacgccattctcctgcctcagcctctcgagtagctgggactacaggcgcctgccaccacgcccagctaattttttgtatttttagtagagagggggtttcaccatgttggccaggatggtctcgatctcctgacctcgtgatccacccacctcagccttccaaagtgctgggattacaggtgtgagccactgcagctggcctctttttcacttttctaaagtgactactagaaaatctaaaatgacgtatgtgtctggcattgtatttctattggaaactactgctgtagagagaaatggtctctagggaggcagaaacatgagaaccacaagaaaggtggatggagggcagtgacagacacatctggtgggtaccttcaggtgcggacagcgggaacccaggagatttgggtgtggacaggcccccatctatgcacagcaggagagtagcatgactgacactaggggtgctgagctgacatacagaactattcagctttataaacatgtgaaaaacaccgctaagtcactgacattccacagaacaaatcataatagaaatgaaaaaacagccaggtgcggtggctcatgcctgtaatcccagcactttgagaggccaaggcggatggatcatgaggtcaggagatcgagaccatcctacctaacacagtgaaaccccgtctctactaaaaatacaaaaacaaaattagccaggcgtggtggcgggagcctgtacttccagctactccaggggctgaggtgggaaaatggcgtgaatctgggaggcagattcttgcagggagccgagatcgccacactacactccagcctggacaacagagcaagactccgtctaaaaaaaaaaaaaaaaaaaaaaaagagagagagaattaatcttgatggaaaatataaaacacttcttcaagaacattaaagaaaattctaaccaccaaaacatttggaattagggtaactgaaatggcagtttaatcctcctgaaggaattttaatttctcactaacagtactttaaagctaggggtagaaaattttttttatagcgtttcacaagcattaaagttaaaaatccaaaatcatgtttttctctgacaggaactcctcctcaaaacagaagaagcctataggattttaacctggaaactactcagggaatctggaatattccttccagggatatctgcagctgaaacctggcagtaatttaaacaaaaccagacaactcttggggtatggttggagcctgaggtctacagatgggtcattttatatgctgaggtctgaacaagatgattttaaccccttaaaatgatggaaacaaaataaaacagaataaattagaagacaacacaggtgagtagtttaaagggcctacttgctgtgttttctctggtcttcaggtctcctcactgtggcgggatccaggcgcagctctagaccaagaaatgggaggattttagagtgactgatgatttctctatcatctgcagttagtaaacattctccacagtttatgcaaaaagtaacaaaaccactgcagatgacaaacactaggtaacacacatactatctcccaaatacctacccacaagctcaacaattttaaactgttaggatcactggctctaatcaccatgacatgaggtcaccaccaaaccatcaagcgctaaacagacagaatgtttccactcctgatccactgtgtggagaagcacagagcttacccactggggccctgcatcagaagagatgcacatgcaccggggtgtgcatttgaacggagcgatcaaaccaccatccccacagctcctctgttcatgggcactgcagtctgtggcctcatgtcctttgggggacacagtgggaaggtaacccacatttcagtgacaccatcaagaaaaacacactgtggcaatttgccctgatttctcatgggccttttctcttttccctttgggttgtatagacttccctactgtccacctgaccactctcatgctgcccaaaaccatagcttaagtcatcagctaggcgtttcttggtgtaactatcgaaaggtgagccttacctgttcaatctctagcgagatttgttcaaaatctggacctagaagaataaataaacaagatttgcctgagtaggtttggctttttccttcttggggaaagcccttaagaaatatcagccccttggccaggcacccacctgtaatcccagcactttgggaggccaaggcgggtgcatcacctgacgtcacaagttcaagaccggcctggccaacatggtgaaaccccgtgtctactaaaaatataaaaaaattagccgggtgtggtggtgggcacctgtaatcccagctactctggaggctgaggcaagagaattgcttgaacccaggagacggaggttgcagtgagccaacacggtgccacagaactccagcctgggaaacagagtgagactctgtttcaaaaaaaaaaaaaaggaaatatcagaccatttgcccaacaactccttgtgcccttcctttaggaacacagtgaaaatccccccggctccacacactatagcgcaggacagacccacagagaacaagacccaagagaacccaccataatacaaactcagggcagggtttccaccatcaaatgttcaagcctgcaatgggttggggagagtggtggttcctgagctccagattttcgtggaggtgggaggtgggcactaggctttgaggagatgttacatctgtgcaaactcacacacaatgaagattacaccaggtcgggtgagatggttcagaaaagacagaaagcagaggaagaggctgaaaatatgggtttctctgtaaactgtgaggacagaaaataccagcaacaccccaggaagtgtttacagccgcatttcttcaattaacagggcaaagttagagcagcaacaaccagacaagggccaggcacttcccctggggcaactgatgtaaacctggaaatcagccaccctcagtgtcaccatttcatgatgaatcaaatatacagagaagttcattgatgggtttggcatcacaaagctaaaaaataaagccagagtcccaggcatatactgaatgctcattgactgaaaatcaacctcactggataagcgcaaaagaactcattttccacatcccttacggtatcctctctggtggctatttgctctgtaaattacctatgacagaagaaaaagaaggaaatgaaaactcaggaaagtaaacactcttctaaactcatgaatagtaaaatatggaaatatccctgagaatctaggagaatatccaaagaaaatgcattataggagggtaaaaaggccatttggcaaagcctacaaaatgagtccaaaatatggttcacaaggaaacttaccttccaatgcatccaaaacagaagaacagcaaaagaagctcctgattcctactgaggtgagaatatcggcacaaacagaaggaaatcaggccaaaaaaaagttacaggccaatttctaaactgctgttagatctaaaacaaatgagaaagtcctgccctaaccaataaaccagagcaaacactatgcatttcaaacactgggggacgtgggcgggggtgagcctgttctgtgcaggacccttctaacatatgggagagtctttgacccctcctcagaataatgccataaactataaaaaaacacaattcatagaatttcaaaggagaccaattacttagaaatgcagctatcaggatgctttaattttttctgacatattaatattgctgtgatagttttaaaaaatagctgaacatttcttgccactcctccctttgggaggcagaatcgatgtcctgtctcccctatcctgggtggatttgctgtgctacctcataaaagacccctcagcatctgccctggagccctgtgcctcctaagaattctgactaccctgaggctgccaggctgtaaggaagtcaaggccatatggaaacactacatataggcactcagtctcagctcaccccctcttccaacatcccaagccaggtatcagatgtgagggaacaagcctccaaatggtcccagaccccagctgttgagtctcctgtgctgaggccagacatcatagacagagacaagtgggctacccttgtgccctgtctgaaatcctgacctgaccatgagaatccacaaacataataaaatgattgtttgagccactaaattttggtgtaattcctgacatactaatagtgtctgtaacagccaccttaacacattaagtaacaatagcaagtagcaagtcatcactgggaagtgttatttggaattgtcttgggaagcagtgacaaccatgaaggctatttggagatgctgtcagatgacataaaaactgctgtggtctcactgttaacaatgtcccatacccacggggtctacagcctatattcaagatggaaggaaacactacattttggttagaggaatgtgatttatatacatataaatcggctgggtgtggtggatcacacctgtaatcccagcactttcggaggccgaggcgggcagatcacccgaggcggggagttccagaccagcttgaccaacatgaagaaaccccatctttactaaaaatacaaaattagctgggtgtggtggcgcatgcctataatcccaactactctcgaggctgaggcaggagaatcgcttgaacctgggaggcggaagttgcagtgagccaagatcgcaccattgcactccagcctgggcaacaagagtgaaactccttctcaaaaaaaaaaaataaataaataaataaataatcaaaaccagtattacagttgataaaggaaatcccaaaacctccttaactggtttctttcataaaagttactctacatacgtgccctaaaaataagacgttggggaaaatactaccacggtcgtacctgagcgagttagagaaaacgccacactttgagacacatgaagaatccgtttatttagctggtggccaagagacggctaacgctcgaaattctctcggcctgaagaaggggctagatttgcttttatactttggtttagaaaggagagggggggtctagttaaaacaattttacagaaataaagtaggcaaaaaagttaaaaggataaatggttacaggaacgttaatagttccaggtgcaggggctttaagattattacaaggtgatagacgcggggcttttgggtgtaatcaattggacgaattcctgggaactgcggatatagcttgccacagtatcttatcagttaattgcattcttggatgtgctgggagtcagcttgcacaagttaagtccttgaggaagcggctgccagtgaaagagccaagatggagtccatctggcgctcttagctaagggagagtcaattcaggtggaaacaaggctgagtgattaaaggaaagggagagtctaaaaacagggttagtaaaaaccaggttggacactacattccccacttgtgtttttggggaatcaaatcattgattcctcagttataacaagggggttatattgagtcttaagatacataagtttgacagaagctatgcattgttttacaaaattaagaaaaagaattaatctaatggcttcacccaacttaggtgcagttttaaggggcctgacccagccctggggacccatgtttctagttgggctccgttggcctttttgatgcgggagtgatgaatccacgcaggaatgccatccaccttcagagccgttggcatcgtgatgacggtgtgaggtctcttccaagcaggagggagtccttctctctggaactttttaacaaacaacaggtcacctggcgggaatgaatggcagggccctgtctgttcaggaattggattgggatgggttcctcgaacaagtggcaggatgatatcttgtacctgttggggagactgtaggtactgtaataaattagtttgtgatatttttgccaattgggcatctcttagcttaggcaagataggcagcgccctcccatacatgatttcaaaaggtaagaacccagcccagtaaggggtgcaccttactctaagtagggctaaaggaaggagacttacacaatttacaccggtttctaagattaattttgtaagagtgttttttagggtgcagttcatgcgttctacttgcccagagctctggggtcgataggcacaatggagcttccattgaatgtttaacgccttactgactgactaaactatagacaaggcgaaggccggtccattatcagaccctatggcaacaggcagcccatgtcgagggatgatttcattgagtaaaaacttaactaccatattgacagtttcgtttttggtagcaaatgcttcagtccatccagagaaggtgtctaccagtactagaaggtatttgtacccagcccggtgtggttttacttctgtaaagtcaatttcccacttttctcctggtgagttttcttggagacggtggcctgggctgggtttaggaccttttttggcatttacctgggcgcaggttgtgcaccggagagctgcttgatctgttaggctttgaagatgggggatcttaaaacggctccggaggagctgaggtagctttgctcctcctaaatgggtggtagactgtaggtgactgattaaagttttcccaagagttcggggtatgaagattctagagtcaggaagaatccaccaaccttcctgatttttattggctctgagttctgaggccagttttcttcttctgttgagtatgcgggattgtcaggcagatctggctgtggaaaggagactgtgggcagcaagtttagaggcgtgactgaaagtcacactgcatcttgagctgctgaatcagctttctggttaccacgggcaacagccgtgttttccttttgatgtcctttacagtggattacagccacctgctgaggtgagtagcccacgctcctggtagatggctccacgtacatgcacagtagcaaaggcgtacctgctgtcagtgttaacgttaatatccttaccccatcggagagcctgagtgagggcgatcaattcagccttttgtgctgaggtgtttgctggtaaagcctgagcccacaacacatctgtctccatggtaacagctgcaccggcctttcgtagtcccttctcgaggaagctgctactgtctgtgaacacggtggcatccacctttcctaggggcacattttgaagatcaggtcggccagtttcagtagtttccaacagttcctgacagtcatgaacaggaatagtggagtttgagtcaggaagtagtgtagctggatttaaacaccatgtgggaggggaagtcaaatgaggctgatctaacagtaaactctgatactccaggatgctttatcagtggcttttttcagctgcctgagctgcttgtttttgtttttcaacctcttgactgtcaaaaaccttttaggctatctctaaaagctgactggtattcattccagcaaaatccctctagtttttggagtttccttttactatctggggctgcctgagccacaaatgccaaattaagagcatggctattttcgggggctgccaggtcaaaaggggtgtaaatccgataagcctcctggaggtgctctaaaaacactcctggtgactcatcatgcccctggacgacttcagtcgccttagacaagtttataggtttctgagcagctccctgaatacccacgaggagataccggtggaaatcgtcaaaagttctccctccacttgagaaatttgggtcccaattaggtcccaattgggtctctaatcactattcctctagcttcctcctccggcctattggttgatgtgaggttgtactttttggcctctctttggatactttccctctcttcagaggtgaaaagggtcaaaaggagctgttgacagtcatcccaggtgggccaatgtgtccagagtacagactccatcagtgaggtcaaagcctggggcttttcagagaagggaggattatgggttttccaattatacaagtcagaagtagaaagaagggacataaaccaggaagggggtggagcactcatcacccagagggacttgtgcctctctcagtggtagtagaggggctacttcctcccaccacggttgcaaccaagaggcaatgggtgatgagcctacaggggacatagccgaggagacatgggatgaccctaagggagtaggctggttttaaggcggtgggactgggtgagggagactctcctcttcttcagagagaggcagtacagggcgagctaaaccggctgagggtcgaggcgaaaacacggtctggctcaggaggaccttggaggtaaaattatgaatggtgcatgagtggagccatggaaggggtgctcctgaccaaactcagccattgatcaatgtagggaaactgatcagggaggccgggagtttcagtaacaacccgccacacagcttgaacaattgtgaggttcagtgacccttcaaggggccactcaactccaaactttggccattctactttgcagagtgtccagagcttgccttttttaaggcggactccataatcctctgagaaaccgagagaaaaattctgcagcatatactggagagggctccaacccttacaaggctgggaggaagtgtttcccctttttttttttttttgaaggcaatttaataagatttgaacatagatatcaaacccagcacagacagagaaactcactccctggggggctggagtatcgaaagaacagaatcaacatgaccagaaagagcagaaaaaccacaacagctaaataccacttgccacatcactgtagctttaagattgagggaggaggactagaggccagcccgagatctcctgggtcagttggatctaggtgttctctctcttcttctagatctgtaccctaaataccttttgtgtctccatgactcaaaggcaaatagctcaaacccagctttttcttttaagggttcaaggagtgagagcagagccaagtcctggagacgctgaacttgctgtcgcactggaaaacgagatgtgtggggtagggggcagggaggaggaaaaggaccacttggatcgtttttaagatgggagagtagccacagaggaacagagtaagaatctaaacgaagtaaagcagtacgagggtaggtttccctacacagtgtgctatttaagggcacaggaaaagttacagaatgaccaaagaggtgagcaaggaaatctgcagggtggctgttttgaacccaccaccagtttagtttagaggaggtccaatcaacctggatgtggggtatgacaatctaaatacaaccatcatggtgccagaaatcccaatcaggcgaatgtttttttacactcattcccgtaacaacacctgacttgcttctggcagaaaagacaggactgtggtggccagcctaaatgattgatgagaaatttaacctcctgtgacaaaaaatcagcactaaggaccttgcagaagttcttacccagacgtcttgggcaatatcgacgtcctgacatgcaaaaccttgacaaccactaaacaagacaatagacaccgaacagaacaataaacataaaacaaacagttgaccctagggcatgtaaacagttatgacagtttcttctttttttttttttagacaaacaaggggagggggtcccgtgatgggatcagtcagatgcccgcctggccgctcccccttaggggacttgggctcctcttagcattgacaggccggtataaacccccggctcggatcgagctatgccggatgctgccttaagccttatgaggtcgccacggaaccgcaggtgagggcccacttgaactccgtagctttcgccgtggagctacaaactggaggacaagcgcaagcccttgtcctcccccattcattcaccattcacacagagtttataacagtttttcttttttctttcccagagattctccaagaaacctgaacaaggaaagattagagatagaaaaagagagagagagagaccagtctgccagaaaccaggactcagtcccccagcatcctgggatgtggactgactcaagggatggcccctgtcagggccacttccctcccagacagagacacagaggcgtctaacagaaaaccagggctctaccctctagcatcctagagaaatgggcagagtcaaaagagggacaccctcatcagggtcgcttccctctgccagaaccaaagtcaaatctgacctacctgaccccggggtcagcagttgaggactcagaggtggaatttttgtgggcacccacatggtagtcgatccgctgtcctccggaagacggtcaccctttggggacctggaaatttttttttcaggtggcactcccccctacaagctggctgtccttccgggggagcacacagcgggcccggctctcgcccggtgacgtttctcccggtgacgtttctcgctggggcctccaaatgtcgtacctgagcgagttagagaaaacgccacactttgagacaaattaaaagtccatttatttagctggccgccaagagatggctaatgctcaaaattctctccgctctgaagaaggggctagatcttcttttatactttggtttagaaaggggaggggaggtctagttaaaacaattttacagaaataaagtaagcaaaaaagttaaaaggataaatggttacaggaaagttaatagttccaggtgcaggggctttaagattattacaaggtgatagacgcggggcttttgggcataatcaatcggatgaattcctcggaactgcggatatagcttgccacagtatcttaacagttaattgcattcttggatgtgctgggagtcagcttgcacaagttaagtccttgaggaaggggctgccagtgaaagagccaagatggagtccatctggcgctcttagctaagggagagtcaattcaggtggaaacaaggctaggtgatttaaggaaagggagagtctaaaaacagggttagtaaaaaccaggttgggcattacactactaagatatcaaaaccaggaacttacttcctttaaaacaattccaaactaactcgctgtgccttacacagaaatttcccccaagaaatatggttttataaagcctgagaagttgttgctattaggacaaacaccaaaactaaaaattggtttaattagcaacaacaaaattccattttaactggctgtccttatcagagacagtccactaaataatacaactggcaaaaagtgagattttgtaaaggttggggtgctttattataaacataacataaaccaggaatgtattttaataaacctcaacctgcgggtcactccctcccaggcgtgcaacaaaacacctgcctagaaatcaaaaggcgttttacccgagtgggctgaaaaagccccgtttttacctttaatctggagacaatacgggtcagaggtcaggaaactacatcagcgccagtgcgagcgcccacgagtccggtggacggatgagaaacggccggggggcagcctgagtcccagttcccgccgtggcaatggccaatttcccacccgtggacgcaaaaggccaggactccacgctgctgaccctccagcgtcccatgtccggcaggcacgtggccgaatagcccaagactgaggactcacacttcccactttgcacctggaggccacctgcagaccaaccttgcgccaggcttccggaaatgggagggcgggcttccggaaacggcggccaatgggaaacgtgatcagatgttactaggcagacagtccgtttccaggcaacacagaagaaaggaacgcgctcagtcagcctcaaatagacggagatttcagccaatggatgtgcaggttccctccacattagccaataagaagtgcttggggcctacctgcctacaagcacagcaaaagctttcctgcgcatttttgcgctggaatggctacctgccgcgccaaatcaaaatttacaatcacccttggtgctgtttcctgcactttcttggagatttgcaccaggcgctggagaccctcccacctggcccatgcctgccacccggtgaacaccaagacccaaccttctgcaccaccagtcttgttgtcagcgaacaggctagtaaattattgaaggggtggcctgcccctccacacctgtgggtatttctcgtcaggtggaacgagagactgagaaaagaaagagacacagagacaaagtatagagaaagaaaagtgagcccaagggaccggcgctcagcacacggaggacctacagggacactggtctctgagttccctcagtatttattgatcattatctctaccatctcggagagggggatgtggcaggccaatagggtaatagtggggagagggtcagcaggaaaacgtgaacaaaggtctctgtgtcataaataagtttaaggaaaggtgctgtgccttgatgtgcacttatacaaacatctcggtgcattaaagagcagtattgccgccagcgtgtctcacctccagccctaaggatgttttctcctatctcagtaagtagaacatacaatcgggttttacaccaagacattctattgcccagggacgagcaggagacagatgccttcctcttacctcaactgcaaagaggccttcctcttttactaatcctcctcagcacagacccttttcgggtgtcgggctgggggatgtcgggctgggggacagtcaggtcttacccttcccatgaggccatatctcaggctatcacatggggagaaatcttggacaatacctggctttcctagacagaggtccctgcggccttccgcagtgtattgtgtccctgggtacttgagattagagaatggtgatgacttttaacaagcatattatcttcaagcacttttttaacaaagcatagccctaaatccattgaaccttgagtcaacacagcacatgtctctgtgagcacagggttggggctagggttacagattaacagcatctcaaggcagaagaatttttcttagtacagaacaaaatggaatctcttatgtctacttctttctacatagacacagtaacagtctgatctctcttttccccacagaagggaagggagggagggagggaaagaaaaagaaaccttaagcattttttacagatgagggttctgctctcccttagttcagccatgctgtgggggaaggggaaggagtgtggtaagatggcagaggaggaaataaaatatggatggcttctgccttttcagttcttttcctcatttcctggcttactgtccctggtttctgactgctttgtggtgaagcttcagaattggagagaaaaagaggccagaattggtggcttatgcctataatcccagcactttgggaggtcgaggcaggcagataacttgaggtcaggttataaatgtttaatacctaaaatgatcaatacctaaaaaaaaaattttttttttgagagggagtctcattctgtcacccaggctggagtgcagtggcgcgatctcggctcactgcaacctctgcctcctgggttcaagagattctcctgcctcagcctcccgagtagctgggattacaggtgagcaccaccacgcccagctaatttttgtatttttagtagagatggggtttcaccatgttggcc[133 bp omitted]gaatgcaaaaaaaaatacagcaaaggcatcattaaaaagcacagtaaacacgattggccaataaacgcatatgaacagatgcttgactcacttgtaatcaaggtaataattttttttttttttgaaaccgggtctcactccaacactcaggctggagtgcagtggcatgatcacagcttactgcagccttgacttcccagactcaagtgatccgtccacctccgcctcccaagtagctgagaccacaggcacatgccaccgcacccaaccaatttttgtattttctgtagaaatggagttttgccatgttgcccagcctggtctcgtacttctgggctcaagcaatcctcctgccttggccttccaaagtgctgggattataggtgtgagccaccgtgcctggcccagtgtaataaatattgaaacttatagcagaggtagggaaatatgaacactgatattcaatgatcaaagggattcaaaactggaacaatggtggagccacaatttggcaataagcagtgaagctgaaagtgtatacagcctataacgaacaatttcatttctaggtaataccttagattcttgactctttaaggaaattaaaaaatacacaaaatgatattcaatatagcatctttattaccacagaaactcatttatgtccttaatcattgtttaatataatatataagcatgtttaacacaaacatatcaaggatcgggctggaatcttttccattctatagaaaagcactaaccatccattaaagcaggtagctactttcagagcatgatatgagctgcaaaaaattgccctgacttatgccgcccccaacacaaccactcaccatatctaaaattacacccttgaagacattcattgtggttatggtagcatctaacaaagctgttcctattccagatattcggactgagaattccacaataaatttgagatacactcagttaaataaaaatgtctttactaaatctttggcaaactgatcatgtatactttgaattcctcaaaagtagatttttattttattttatttgagactgagtttcactcttgttgcccaggttggagtgcaatggcaaaatctcagctcactgcaatctccatttcctgggttcaagcaattctcctgcctcagcctcccaagtagctgggattacaggtgcaagccaccacgcccagctaattttgtatttttagtagagacagggtttcaccatgttggccaggctggtctcaaactcctgacctcaagtgatctgctcgccttggcctcccaaaatgttgggattacaggcgtgagccaccgtgcctggccaaaagtagatgttttatgttttgcttcatttgcctattttcccaagaaatctttttttcaaataccatcgagaattaatattccttgaagcaaacttctggagaatgttgaatttaggggtcaaacacaggctttctggaggtatttggtgcttgggaaaagaaacactgacctattagcaaagatagattttgtaataaattctaaataaactttatttagaattgtgaaaaatagaatcttcataatgaaggtggtctagaatttgctttcagaaactatcttcatctaatttttattaggattattttaccttgcagaattaattggtaaaatctttaggattatctattccttaaagtttttataagtatcagattttttaaacagggagttcacacacacacacacacacacacattttttgttaatctatttgggttatacggtgagttaattgtaaaacatattccttttgggggaaaaatgcaatcctacatttttacttgtactggaatgaatatacacgtttgtgcatgtgtgcatgtatagttttaccatattatgtttattatttttgagacaggttctcactctgtcacccaggctggagtgcagtggcgtgatcttggttcaccgcaacctctgcctcctgggttcaagcaattctcctgcctcaggctccccagtagcttagattacaggtgcccgccaccatgacaggctaatttttgtatttttagtagagatggggttttgctatgttggtcaggctggtctcgaactcctgacttcaagtgatccacccacctcggcctcccaaagtgctggggttacaggtgtgagccactgtgcccggcctagttttgccttataattttaaaaatctgcttgatataatctagagttgtgtctcttttatcatcattaatactctaaatgtattatctttcattttctcttccttgattataactgccaaaatctaatcactattaacattgaatcaagtctaatattctccattctcttaatttctactttctactgttacttggctgttcctttttttttttttttttttttgacagactcttgctctgttacccaggctggagtgcagtggcgcgatctcaactcaccacaaactccgcctcctggattcaagtgattctcctgccttagcctcccaagtagctgggattacaggcatgcaccaccatgcctggctaattttgtatctttaatagagatggggtttctcagtgttggtcaggctggtctcaaaatcccgacctcaggtgatccacctgccatggcctcccaaagtgctgggattacaggcatgagccaccgcacctggccacttggctgttctttacttgggttggttttattttgttgtttcctttttcttgacggaaatacttattcattccctcaacacattcatctgtgtgacaggcctggtgttgctgctgtgggtaagtgaagaagatgaagactgtatccacaaataagatttccttaccacattacagggcattaatttgtcactgaacagaactttgattatatctgacaaggttagatgtgcaggcatctcactgtcattcatttctacatagtctataattttggttttgattttaaacattttattattgaaatttcaaacacatacaaaagtagaaatattagaacaataagtctccatgaacaaaacactccacttaaattatcaacatgttgccaatttagtttccagctctctttgccaattatttcttttgctagaatattttaatccaaatgtgtctatcttcatttcatagtatgtatctcatatcatacgatcttttattttttataatcacactgacataatccctaaccaaattaatatatgtaaatatcatttaatatttagtccatgtccacacttccctcactgtctccaaaatggctttttatgttttgttcaaaccaggtccaagtaatgccaacatactgaatttagttgatatgtctctttaagtctcttttaatctgttaatggttgcccttccccttgtattttcatgctacctgttagttgaagaaatcaggtaatttgctctgtagaatttcacacattctggatctgtttggcttcttccttgtggtgccctttatagccagccctccatatgtgcagattcaaccaatctcaaatagaaaatactcaaaaaaaaacaataaaaataaaatacaataaaaataatgcaaattgaaaaatacagtataacaactatttacatagtatttacattgtgataggtataagtgatctaaagataatttaaagtatacaggaagatgtgagtaggtaatatgcaaatacatactatgccattttatacaagggacttgagcatcctcagattttaccatcagtggaggatcctggaaccaattccccatggataccaagggatgaccatatactgttcatctagtccctgtctgctttcagttcattattccagcaataaggctttgtagatggtggtgtggacttcctattgcattacgtcaggaagtgtgttgtctgatagacccatttttattaaggttaaaacagatcaaagggttcagaggtggccagtttgatagatccaccataaaaatctcgctataaaatatttcacctattagttgtagtacccattgaagatcatgttttctggacccattattccattaaggtctagaaaatggtgatttttctaatcctctaattccttctagatttattagacttcttcaaaaaagaaaaacccattcaaaaaacaaattttttttttgagacagggtctcactctgtcacccaggctggagtgcagtggcacgatctcagctcactgcaaactctgcctcttgggttcaagtgatcctcccacctcagcctgggactacaggtgtgtgccaccatgcctggctaaattttgtatttttagtacagacagggtttcaccatgttaaccaggttggtctcaaactcctggcctcaagtgatccacccaccttgtcctcccaaagtgctgggattacaggtgtgacccctgtgccaggccaaattcatttgaatttgatgaacttctggtgaccctgaaatttggttcacatgggaaaaggaaactaaatgacaatttttcctctgatttattgatttcaagaataatgagttgggctgggtgtggtggctcatacctgtaaccccagcacctttggaggccaaggagggaggatcacttgagcccagaagttcaagaccagcctgggcaacatagtgagaccctttctctaaaaaaaaaaaaaaaatttaggtggaagaatcacttgagcccaggaggaacagggtacagtgaactgtgcttgtaccactgcactccagcctgggggacaaagtgacaccctgtctcaaaaaaattatacattggtgctctagcatctttcataggttaccaaattatgcagccacaatcaagtaaactatcaaattattggtgggatcacatcaaaaactcaacttgaaacaactcctactggttgaagatatggcattttgagcatccaaaagtatactgacttatagaatgatgttttgtttctttcccacaggagttttatacacacacataaatatacacaacaatattaaattcctaggtggttaatttcttttaagccacatttttgatagtttctaattaattttaaactgtggtcagacaacagggattgtaagccttttgctttctggaattatgggaaaatcatttcctatttccctctaattcttcaacagctgtattactagtgacctcacattcatgaaattcatttttggcatgaaatttctaatgcagctcaagtgctgaagaacttcctacattcactacaatctaaattttacctagaataaattatgtttaataatttctgagaggtgacaggaggcatttctacatttattatgtctacagatcttccttttacgtgaattcactaatactaatgacaataataacaattacagataatatttacagaatacatgctatatgactgtgattcctccaagtattaactacttactccttgcaacaatcctattccacagtgtggcaggctgactctaaacaggccccccagtggtcctgtctccaggacttattcacactcttgtatcatcccgttctcttgagtgtggactatcctagtaacttacttctaccagtagaaggtgagggaatgttacttccatgattagattacacaagatggtaacttccatcttgctagcagactgtcctcccttttggcttgcatgccttgatgaagcaagcagccatgttgatgaggctattgtggccaggagctgcagtcagcgttcagccaacagccagctagaaactgagaatctcaatgcaacaggcctcacggaaatacattgggtaacaactatgttagtctggatgtggatccttccccagttgagccttcagatgagacctcagccctggctgaaatctgtagccttgcaagagaccctgaagcagaggacccaactaagtcatgcctatactcctgatccaaattataagatataattatatgttattttatgctactaagtctgtggtaatttattacgcagcaataaataactaatacatataagtactattattaccattttacaagtcagcaaaatgaggcacagaagcttagtatcttgtccaataaatcaaactggtaatcaagtggagaaagggagataatgacagataaggctaaagattttcctacattcattacattattctctcataggaatttgctgaagataaaccatgtttaaatggtgttggaaggcttttaaatcaacatattctttctctaatataaaatttattatgcttggaattgagcatgaaacacattttctcaaaaatgaattttctgatgttctgtaacatcatatacatttgaaggctttcttctattaaattccattatgaatcttctgatgctgagtaaggtgtgaatgctgtctaaaggccttcttacactccttacacttgtagggcttctcaccagtatgaattctctggtgttgagtaagaaatgaataaagtctaaaagccttaccacattccttacattcataaggtttctcaccagtgtgaatactctgatgttgggtaagttgtgagagcagtctaaaaggttttctacattccttacattcataaggtttctcaccagtgtgaatactttgatgctgagtaagttgtgagagcagtctaaaggcctttccacactcttcacattcatagggtctctcaccaatatgaatgctctggtgtgaaataagctgtgagtaactactaaaggtcttccaacattccatacattcatagggtttctcacgagtatgtattctctgatggcgaactagttgttgtcttaatctaaaagtcttcccacattccttacattcgtagggtttctcaccagtatgaatactctgatgaacagtaagttgttggcatattctaaaagcctttccacactccttacattcatagggtttctcaccaaaatgaattttctgatgtactctaaggtctggaccacatacgaaggctttcccacattccttacattcatagagcttttcagcagtatgaagtctctgatggcgtgtaaggtgtgtacactgtctaaaggtctttccacagtccttacattcatagggtttctcaccagtgtgaattctctgatgtcgagccagttgctgatgtactctaaaggcctttccacattccttacattcatagggtttttcacccgtatgaagtctctgatgttgagtaagttcttggagcactgtaaaggccttcccacactccttacattcatagggtttctcaccggtgtgaagtttgtgatgtcgaataagatgtgcacgctgtctaaaggcctgcccacattccttacacttataaggtttctcaccagtatgaattctcaggtgttgactaagtgttgagcgacgaataaaggtcttcctacactccttacactcatacaccttttctccattatgaacgatctgatactcagtaagaaaattgtgccttttgtaagtggtcattttttcagaggtaattttcacttgcccaaaatatccctcttgttgttccttttccccctcaatcttgcttttgcattcccaatcattcctaaaaatggaaccctgaaggctatagcttttaattctttccattatatcccactgaaatgaatatatttcataaatgtccttttctggagataaagtattggtcctgtatctggactccaaatctgaaagaaaacaagaaagcaaatacatactgttttcctgttccagaaagaaaaaacaaacaaacaaaaaaaccacttctatagagaaaaggcacctaaaataatgcctgttacaaattgaatggattagacagatctcaaacatagacatttctgccacaatcttatatatgtgtacctaaaaaaccttatcttctacaaaagtacacactaaaaattactgtgttcagaagaaaaataggcccggagcaggaccacttaattttttttttttctttggagatggagtctcgctctgttgcccaggctggagtgcagtagtgcgatcccggctcactgaaagctccgcctcccgggttcacgccattctcctgcctcagcctcccaagtagctgggactaccggcacctgccaccacgcccggctaatttttttttgtattttttagtagggacggggtttcaccgtgttagccaggatggtatcgatctcctgacctcgtgatccacccacctcggcctcccaaagtgctgggattacaggagtgagccactgcgcccggcgaggaccacttcattctatgcctttttttttttttttttttttttgagacacagtcttgctctgtcacccaggctggagtgcagtggcacaatctcggctcactgcaacctctgcctcctgggttcaagcaattctcctgcctcagccctcctagtagctgggattacaggcacacacccccaagcccggctaatatttttgtgtgtatttttagtagagacagggtttcaccatgttggccagactggtctcgaactcctgacctcaggtgatccgcccgcctcagccttccaaagtgctgggattacaggtgtgagccaccatgcccagccaattctatgcatctttaatcagtagaacactaacaaataaaatagttgacatctaaagggataaaccaaaagacacctcagcacttcatgtgtattaaaatgcacaaaaataaagagacaatgctagacttcaggtcctgagacactgtacatgaaaataaagcccagagccagtgaggacatcattaaggtgggagtaaggtaaagtgcagcctgtctttagataagaggccatgcaaggttgatggtatattcctctggggagggagacctgggtgcagacatttattattaattttcttaaaacgggtgaaagggctcctgataataaagcatcatgtagaaggcctttgtctttcctactgaacattataaatatacctccactaagctagctccactggactagaaaaattactcataagccaatcatctacattatacacaattcttttgccactattctgctaatgtgtaccatgggacagattgcactctcatcattttgaaaaagggaaacacagcaaataaagagtccaggagtgcaggcagggctggtgattaggaaagcaagtcaaatcagtgaagccctgttttaagtgtggataagaatcacctagagatttgtttaaactatgcagaggtgtttttaactgactgaaaccatctataggacaaagtcctgggcaagtaattgttttgttcttgtttatattcttcaagaaattattgggatgctgatcaatatttgagtctctctgtttaaatgttttcaatgctatctctttaccattataataaaatataaatacctgagcataaataataaagctgctgcttgtcaacaaatatcttctcccatttgttctctctgttcatagcatactggcctctttcaacgcacaaaatgccccacaactgttccaaataaataggactcttcacaggctgctccttctttgaggaatcctctgacactgcatggttggctggttttcattctcagcctcaaatcaaaatcacttcttcacaaaggctagtcctgctggccctatttaagtctatgcactttacgcttgtcttactccattttctgttgcttataatgaagtatctgaaaatggataatttataaagaaaaggaatgtattattattatttctactctactctgacggattaaggagtttatttcttaacaattatgggggctgagaactccaaagttgagggactgcatctggtgagagccttcttgctggtgacaaccctgcagagtcccaaggcagcgcacagaccatcaatgggtaatgggggctgagtgtgctagctcaggtgtctcttttgcttcttacgaagccatgtgtcccactcccataataactcattaatccattaagccatgaaagcccttgtgacccattcacccctcatagatcccacccattggggattaagtttcaacatgagttttggaggagacaaacattcaaaccacactctcttagcacactctttctcttttctttgtttttttgagatggagtttcttgttgcccaggctggagtgcagtggcacaatctcagctcactgcaacctctgcctcctgggttcaagtaattctcctgcctcaacctccccagtagctgggattacaggcacccaccaccaggctcggctaatttttctgtatttttagtagagacggggtttcaccatgttggccaggctggtctcgaactcctgacctcagatgatctgcccgcctcggcctcccaaagtgctgagattacagtgtgagacactgcacctggccatgcacattctttttcatatttataacactttctccaatttttgaatcatatgtttattaattttctcatattattctgttagtttagttagtctgttagttaagtgttatccttgaactacccccagggcagaaacaatctctattatcaccattaattagcaaatcccaaatacataatagatattaccagtttaattctcataattatataatcattaattaataggtatatctgcctctaatctttataccagaggtccccaacccccaggccacagaccagtccatggtctgttgggaaccgggctgcacagcagaaggtgagcagcaggtgagcgagcatgaccgcctgagctcggcctcctgtcagatcagcggtgactagattctcataggagcgtgaaccttattgtgaactgtgtatgcgagggatctaggttgcacactccttatgagaatctactgcctgattatctgaggtggaacagtttcatcccaaaaccacgtaccattttctcccgccccagtccatggaaacattgtcttccacaaaactggtccctggtgtcaaaaaggtagggactgctactttataccatattataatgatttacttatctctgctagaatttatactatgacttatcaatgctacacttactcaaacttttgttggccgggcactgtggttcacacctataatcccagcactttgggaggccgagggggcagatcacctgaggtcgggagttcgagaacagcctgacccacttggagagaaaccccatctctactaaaaatacaaaattagctgagcgttttggcaaatgcctgtaatcttagctactcgggaggctgaggcaggaaaattgcttgaatctgggaggcggaggttggggtgagccaagattgtgccattgcactccagcgtgagcaacaagagtgaaactccatctcaaacaaaacaaaacttttgttccttcatatcctccccatgtgtggtcctatccattcccatgtagccaacgcaactaaagtattttttttcaatcatgctaacattgaaaggcttatgaaatcctgagcaaaaggtcatggtaaatgtcaagtacagcagaatgactatcaaaaatggaagggcatctggggtcacctgaatgcaacagagtaaaaataaaggctatgttggatgtgggcttgaagatcatgatccagatggcgtactttcatgaagaaaatcgaaaatgctgaatgaagtaagcaaagacatgggttgagatggtataggaaaggaggagaatttttttctgtgactacagtataaatgtgtaaaactggtgaaatgacccaaagaatagtttgtgatcactgcaagacaaaataggaaaaaacaaaatcatgaaaccaaaagacatcttcacttcagattttaaaactctttcctaaatatagaacagtaatattgaaaaatacattatagagaacctatgaaatatagctacagatctcagaagaaattttatagatacatttaaattcttagagcaatagaaatgaaggaaaatatatgagtatcccacacaaaagttagaaaaagaacaacaaagtatactgaggaacaaagaatgaagaaatagattaaaatgaaagcagaatttcattaattagataacagaaatgaaagacatataaaaaatccaggttggccaggcacgatgactcatgcctgtaaacccagcactttgggaggctgaggctggaggattgcttgagcccaggagttcaagaccagtctgggcaacatggcaaaaccctatctctacaaaaaattagccaggcatggtggtgcttgcttatagtcccagctactcgaaagactgagggaaagaggatcgtctgagcccgggaggcgggcattgcaatgagccatgattatgccactgcctgggtgacagagcgacaacctgtctcaaaacaaacaaaaaacccaggttgtttggaaaacaaaaacaaaaacaaaacaaaaaaacaaaaaacaaaaacaaaatcagtggaacataaccattagctaagataataagagaaaaaggaaagcattcaaacaaaataaaaaatggccactagctattcagtgacaactccccatagagctctcactttttttttttgagacagagtcttgctctgtcgccaggctggagtgtagtgtggcgcagtctcagctcactgcaacctctgcctcccgggttcaagtgatcctcctgcctcagcctcctgagtaggtgggactacaggtgtttctaccatgcccagctaattttttgtatttttagtggaaacggggtttc[133 bp omitted]aagcactacctacctttgttctgggatatcttttcaagaatgtttctatactataacaaacagccttgcaaggtagagataacgtctctgtctggatcaataggcaggttcgcttgcttgttcaggataataaaggtaatgtctccttccaagctaaggctacgtacacttattgcccacgatgaatgatttgggttcttcaagctcagtgttccttttctataaggcagctcactgcatgctcaggaactatctagacccatccttatcagcctcatgtgacttgcaggcaaggaggaactgctggctgtgctgagagcaatcaaatcctttgtctttgactgagagcatgtgtttcctgccagcatccatgacactacggcaagctaacttgtcagcttgcaagtagggtgaagttgtagaaataatatagttcttgacacatgtaaataactaacaaaacagaatattttgaaaattataagggactactatgacaaccaaggctaattactaacaaagtatagaaaaagtattcaaggctgggcgcaatggctcacgtctgtaatcccagcactttgggaggccgaggagggtggattgcttgaggtcaggagttcgagaccagcctggccaatatggtgaaacctcatctctacaaaaactacaaaaattagccaggtgtgctggaaggcgcctatagtcccagttactcgggaggctggggcaggaaatgacttgaacccaggaggcagaggttgcaatgagccgagatcacgccactgcactatagcctgggtgacagagtgaggctccatctcaaaaaaaacaaagaaaagaaagaaaaagaaaaagtaatcaaagacccactccaaaaattattttgaagattatcaaaacttgagaaagcactcaattatatttaaagtggcccagaacattttataaagcctaatactccaagttatctttgagtataaaaatgaaatcaggctgtgcgcagtggctcacgcctgtcaatccagctctttgggaggccaaggcaggcagatcacctgaggtcgggagtttgagaccagcctggccaacatggtgaaactgtcatactaaaaacacaaaaattagctgggtgtggtggcacgtgcctgtaaccctagctactcgggaggctgaggcaggagaacctcttgaacccgggaggtggaggttgaggtgagccaatatcatgccactgcactccagcctgggcaacagagtgagaaaaaaaaaagtcttctttctctttgcccacacatattcccttagaaaagtcaatttctaatggctttctttggtcaccagatagtcacatagaataggcaaagcctacagaacagaaaaataagtaattgggtgccatgtaataatactacagggatttgaattaaggattgacatttcattttaaatgaaattgtgtaactggcttttaagtacattttaaaaggattgggtaggtacttgggtcgatacttctgtttgaggtgttcaagccacaaatatacaaatatatagctatcactgataaacctgggaagctgacccctttaggctaagttggccttcatgagatcagaatgcccagcacctgtgtatcagggtaacaccagctgactccttgatatagaggttctggaggatgtcttaccaggacagtcagggaagtcaggattttgtttgtttgtttggagatgaagtctcactctgtcacccaggctggagtgcagtggcacaatcttggctcactgcaacctccgcctcctggattcaagcgattctcctgcctcagcctcccaagtagctgggattacaggtatgcaccaccatgccctgctaatttttgtatttttggtagagacggtttcatcatgtttagccaggctggtcttgaactccagagtcaggatttgaccccgcctgtgctgcaaccttctgggacctcctgtaggaagtgctatacctgctttggaagaagcagctctcagaggaaataacaccaatgggttcctccccaagagatcccagaaaccagaggtggaacttaagctggcttgtattttttttatcaatgctctgactctgtatctcagtggaaaattctattcaacaagaagaggagggctgggcacagtggctcacacctgtaatcccagcactttgggaggccgaggtgggcagatcgcctgaggtcaggagttcgagaccagcctggccaacgtggtgaaaccccatctctactaaaaatacaaaaaattagccgggtgtagtgccacatgcctgtaattccagctacttgggaagctgaggcaggagaatcacttgaacccaggagaggcggaggtttcagtgagccgagattatgccattgcattccagcctgggctataagaggggaactctgtctcaaaaaaaaaaacaaaaaaaaaaaaacaaaaaaaaaaaaacaggaagaacataatttctcctctagaactaaaaaatatttgtattttatcagaataatataccagtttaattaataattcccttaacgccctttgaaaatgtgaatttacaggctgggcacagtggctcacgcctgtaatcccagcactctgggaggctgaggtgggtagatcacctgagctcaggagtttgagcccagcctgggcaacatggcaaaaccccatctctactaaacatacaaaaaattagccaggcgtggtggtgtgcacctataatcccagctacttaggaggctgaggcaggagtatcacttgaacctcaggaggcagaggccacagtgagccaagatggcaccactgcactccagcctgggtcgcagagcaagactctgtctcaaaacaaaaaaaaaatatatatatatataatatatatataatatatactatgtatattatctataaatattaaaatgaaaatgaaaaatctaatggacagctttaacaacagcttagacttagcacaagagaagactagtgaatagagacatggatttgaagaagatttcaaggttgaaaggaataaaaaagaacaatagataggctgggcgtggtggctcacacctgtaatcccaacactttaggaggccaaggcgggcagactgctttgaactcaaactccacaagtttgagaccagcatggccagcatggtgaaaccctgtctctactaaaaatacacacacaaaaaagtagctgggtgtggtggtgcttgagcccgggaagtggagtctgcagtgagctgagattgtgccactgcaccccagcctggaaaacagagccacactctgtctcaaaaaaacaaaacaaacaaaaaaaaaaaacagaaaagaacataaaagatacatgggacaatgttaaagtgtctaacatatgtgtaactcacacagagaaaagaacaaaaatgagaaacaaacactatctgaagatatagtaaccagaattttcccaaactgacaaaagacatcaaacccaagatttaaaaaaattcctagctgagcctagtgactcaggcctgtaatctcaacaatttgggaagccaaggagggaaaactacttgaggctaggagttcaagaccatcctgggcaacatagggagacccccatctctaaaaaaatacaaaagttcactgggtgtggtggtgtgcacctgtggtccaagctacttgggaggctgaggtgggaggatcacttgagcccaggagggtgaggctgccgtgagctgaaatcatgccactgcactccaacctgggcatccaagcaagatcctgtctttaaaaaaccaaaaaaaaacaaaaaacagcttcctaaatacttcaagcagatgacaacacaatatccaccacactacaaaactacaccacaatataattgggatttttacatttcactgcaatataaaattaggcacaccacagtaatctgttaaaaaaaaatccaaaagcagctaacgggaaaaaatacctctaaaacaatatctctgaaggagttacaatataagtgacaaactactactcaatggaaataatgaaagccagaagacaaggaggggatatttgctaagagaaaataactgccaactcagaattctattctccacaaaaataaagacaaaattttgtaccctttaaaaattaagacgtaataaagatattttctaataaaacctaagataatttattgccagtggacacaataaaataaatactaagtaagttctttgggtacacagaaaatggttccagataaaagcaatgcaatgcagaaaataataaggagcactgtaaaaggtaaatgtgtgggcaaatgtaaaaaaaattcactacttattacaataagaaattaatgccctgtggggatt[131 bp omitted]gcgaaaccccgtctctactaaaaactacaaaaattagccggcatggtggtgcatgcctgtagtcccagctactctagaggccgaggtgggagaattgcttgaacccaggaggcagaggttgcagtgagccaggatcccaccactgcactccagcctaggcaacagagcaagactgcatatcacaaaaagaaaaaaaaaggcatatgacaacaaatgcacaaaaaactgaggacacataaaaggaattaaaatactattaagggttgcgtacagtggcttacgcctgtaatcacagtactttgggaggctgagacaggaggatcatctgagaccaagagtttgagaccagcctggccaacacagtgagacccccatctctaaaataaaacaaattagccgggcatggtggtgtgtacccgtagtcctacctacccaagaggctgaagtaggagaattgcttgagcccaggagtttgaggttgcagtgagctatgatcacaccactgcactccagcctgggtgatgcagtgagaccttgtctctaa[137 bp omitted]tggtgaaaccccgtctctactaaaaatacaaaaaaattagcggggcgtggtggtgagcgcctgtagtcccagctactcgggaggctgaggcaggagaacggcgtgaactcgggaggcagagcttgcagcgagccgagatcgtgccactgcactccattctgggcaacggagccagactctgtctcaaaaaaaaaaaaattctattaagatccctacaattttgaacaagatataaagaagctaatttcagattcaatgcaataagtaaataatgtacttgttattgtctaaggcaaccacaagaagaaaaataaatgtatgtataatgatcatgttataaaaggaaaaactagaataaaaatgcttgattaatccaaaaaaggcaggagaatgaaaaaagtaagaacatattaagcaaacagaaaaacactgggaagacagcagatttaaacccaaatatgtaagaaaattaatgaaatgtagatgcataaaatacatcaattaatagacaaaaatgactgggcacagtggctcacacctgtaataccagcacttcgggaggccaaggtgggagaatcccttgaggccaggagttttagagcaacctggcaacacagtgagacactgtctctacaaaaaatgcttaaaaattagccatgtgggctgggcgcggtggctcacacctgtaatcccaacactttgggaggccgaggcgggcggatcacaaggccaggagatcgagaccatcatggctaacacggtgaaaccccgtctctactaaaaatataaaaaattagccgggcgtggtggcaggcgcctgtagtcccagctacttgggaggctgaggcagaagaatggcgtgaacccgggaggcggagcttgcagtgagccgagatcgcgccactgcactccagcccgggcgacagagcgagactctgtctcaaaaaaaaaaaaaaaattagccatgtgtggtggtgcgcacctgtagtcccaactactcaggaggctgaggtgggaggatcacttgagcccaggaagttgagccatgttcatgtcactgccctccagcctgaggcaacagagcaagaccctatctcgaagaaaaaaaaaagatcttccttacccacactggggatgggatgctgtttccattactggaggcagcctagtgcaggctgttgcagtacaagcacagtaagggaagtattcagagaagagcagcccagcatgtaccaggcaaacctatcaggaatctaacattttctctcagccttccactagtaccattctcagcaaaaccactatcatcttcaatgtggacaaatgaaatagcctcctagtgggtcttcaaactatccatcatgcccttattcaatctattctctgtagagtggtaattatttaaaaatcagctcatgtaggccgggtgtggtggctcacgcctgtaattccagcactttgggaggccgaggcaggcagatcacaaggtcaggcgttcgagaccagcctgaccaacacactgaaaccccatgtctactaaaaatacaaaaattagctgagcgtggtagcgtgtgcctgtaatcccagctactcgggaggctgaggcaggacaatcgcttgaaccaggaggcggaggttgcagtgagccgagattgcgccactacactccagtctgggtgacagagtgagactccatctcaaaaaaaaaaaaaaaaaatcagctcatgttactcccctgctcaaaaatctccagcagctttctactacacttaaaataaaaaaaagtcagatgcagctgagtgcagtggctcacacctgtaatcccagcactttgggagactgaggtgggaggatcgcttgagcctaggagttcaagaccagcctgggcaacatagcaaaactcccgtctctacaaaaaatacaaaaattttccagcggtggtggcatgcgcctgtagtcccagctacttgggaggctgaggtgggacgatcacttgaacccaggagttcaaggctgcagtgagtcatgatcacaccactgcactccagcctgggcaacagaacaagaccctgtctcaaaaaaaaaaaaaaaaagccgggcacagtggctcatatctgtaatcccaacactttgggaggccgaggcaggtagattacaaggtcaggagttcaagaccagcctggccaacatggtgaaaccttgtctctactaaaaatacaaaaattagccaagcacggtggtgggcacctgtaatcccagctacttaggaggctgagacaggagtatcgcctgaacctgggaggtggagattgcagtgagctgagatggtgcaactgcactccaggctgggcgacagagagagattccatctcaaaaaaaaaaaaaaaaagtcaaatgccttctcctatgatatacaaaccattacatgatctcgctcttgcctaacattatcttgtttctacacctttcacttaccttttgaataagcatcttaatcatcttgggcttcttgcagttcctcaaaaatacaaagctcccctcagcccacccaaagcctttgtatttgctgttctctgccaggaatgccgttgctttagatattcatatggcctgggctcttttttcatgtcactattcaagtatcacctcctcaaaatgtcctgaccaccctatttaaaacatccctatctctacttgccaacttccattctcacccaggctggaatgcagcagcgcgatctcggctcactgcaacctccacctcccaggttcaagcgatacttctgccttagcctcctgagtagctgggactacaggcatgtgccaccacgcccagctaattttcgtattttcagtagagacaggtttcaccatgttggccaggctggtctcgaactcctggcctcaagtgatcctcccacctcagcctctcaaagtgctgggattacaggcacgaagccactgcgcctggcccttcttacttttcttaatacttgtccctacctaatattatgtattgatgtacttgtttacttcatgtccttactcctattaagatgtaagcaacatgattgctgggacccatgattctcattcacatctgctccactggtgtccagcacaacacctagttccaactaggcactcaagtatttgccaaataaataaaggaatatatttctagccaatgaaagacatatcaacctaatcataatagaagctagaaagaaactgggtcctaaatatggactgaactctgttcccctaaaatttgaatgttgagccctaactaactgtatgtggagatggggcttttaggaggtaattaaggttaaaggaggcctagaggaggggtcctaatccactagaattactggccttgtaagaagaagaagagggccaggtgcagtggctcgcgcctgtaatcccagcaccttgggaggcagaggtatgaggatcacttgagcccaggagttcaagaacagcctagggaatacagggagatctctgtctctataaatttttttttttttaaatagctaagtgtggaggcatgtgccagtaaacccagctactcaggaggctgagacgggaggattgcttgggcccaggagttcaagactgcagtgagctgtgatggcaccattgcactccagcctgggcaacacagtgaagccctgtctcaaaaaaaaaaagaagaaaaaaaaaggaagagagtgacctctttctctctctgtgtcatatgaggacacaacaagaaggcagctgcctgcaagccaggaagagagacttcaccagaacctggcaccctgattttggacttccagcatctagaattgtgagaaaatacatatctggtgtttaagccacccagactatggtattctgttacagcagcttaagatgatacagatttaaatagagatgaaactgtagtcaccgatcaaaaaaaagagtagcccctctctttgtcaaatcttttccccattcccctcaacagcatccttaaaattttttttattttaaaataattatagatccatgggaagttgcacaaaatgtacagaaaagtcctgtgtagacttcacccagcccctcccagtgttaacatcttaggtaagtatagcacaatattcaaaacaagaaattaatggggctgggcgcagtagctcatgcctctaatcctagcactttgggaggctgaggtggatggatcacctgaggtcaggagttcgaaaccagactggccaacatggtaaaactccctctctactaaaaatacaaaattaggtggtggcgcatgcctataatctcagctacttgagaggctgaggtaggagaatcgcataaacctgggaggcagaggttgcagtgagccgagatcccgccactgcactccagcgtgggtgacagagcgagactgtctcaaaaaaaaaaaaaagaaagaaattaatgttggtatattccatagagcttacttagacttcaccagttctatgtgcactcatgtgtgtttatttgcatagctctatgcaattttatcacaggtagcctcgcaaaaccaccaccaaaatcaagatactcacctgtaccatgactgcaagatttcctcatgttacccctttctaacccgaaccatcctctacgccctacatccctacccttggaaaccactaatttgtttttccatctctatgtgattttgcaaatattacataaataaagtcatgtagtgcataaccatttgtgattgattttgtcactcagcataatttccttgaaattcacccaagttgttgcatgtatcaagagtttattgcttactgttgctcagtttattcatggtattggtgtgcctttcaatcagttttaattgggctacttatcatttagcactgagctgtgtatatactagatactggtcccttgtcagatatgttttaccactattactctcccagtctgtgactcacccattcatctgcttattggtatattctgatgagacaaagttttcaatttggataaagtctaatgtcttaattttttatttatttattttgagacagagtcccactctgtcacccaggctggagtgcagcggtgtgatcttggctcactggaacctccacctcctgggttcaagcaattgtcctgcctcagcctcctgagtagctgggattacaggcgcatgccaagacgcccagctaatttttgtattttcagtagagatcaggtttcgccatgttggccaggctggtctcaaactcccaatatcaggcgatctgcccgccttggcctcccaaagtgctaggattacagatgtaagccactgcgcccggtctgatttttttatttttatggttattgttttcactcaagaaacctttgcctactcccaagtcataagttgggacactcatcactgtcctgtttccctctaaaaactttatgattgtagcttttatatgtaggtctaaaaaccatctcaaattaattttggtatgaggtaaaagctgagaggtttgtttatttgtttccccagttattccagtactatttgttgaaaagcctttcttctccccattggaatgctttggcatctttgtcaaacaataaatgaccctttagtgcgtgtgtggcagggtatgtttctaggacctctgttgtgttttgttcggtaatctttgccaataacatactgtcttgatcactgtagttttaataaatcctgaagtttttgttttttgtttttttttttgagataagagtctcactctgtcacccagggtggagtgcagtggtgtgatctcggctcactgcaacctccgcttcccaggttcaagagattctcatgcctcaccctccccagtagctgggattacaggcttgcaccaccatgcctggctaatttttgtatttttagtagagatagggttttaccatgttggccaggctggtcttgaactcctgacctcaggtgatccacctgcctcggccttccaaagtacagggattccaggcatgagccaccatgcccggctctgatctatctatctatctatctatctatctatctatctatctatctatcatctatctatctatctatctatctattttattttttgagatggagtcttgctctatcgtctgagctggagtgcagtggtgtgatctcggctcactgcaaactccgcctcccgggttcaaccaattctcccacctcagcctcctgactagctgggattacaggcgtgcgccactacatccagctaatgtttgtatttttagtagagacggggtttcaccatgttggccaggctggtctcgaactcctgacctcaactgatctgcctgccttggcctcccaaagtgctaggattatatgtgtgagccactgcacccggcctgattttttaatattaaccttatatcccatgaccttattgtgatttttcaattattacttcgaatagttgttgtcttgattccttaggactttctatgtacacaatcatgtcatctccaaatacagacttatgtcttcctttttgatctttatgtctcatttctttttcttttgataatggatttttatagtttataatgtattttttaaataggtgccccttaccagattgaggaagttcccttcaatttctagtttgctgagagctttttatcatgaatggatgttggattttgtcatatgctatttttacatctatgaagatgattgctatggtttgaatgtttgttgcctccaaaactcatgttgaaaattaattcctaatggcaatattgagaggtggggtttttaagaggtgactgggtcatgagggctctgctctcatgaatggatgaacctattcatggattggtgagttaatcgattaatgggttatcacaggattgggactgatgactttataagaagaagagaggcctcaactagcacatttgcatgttcagcccacttgccatttgatgccctgcaaagcctcggaattcagcagagtccccaccagcaagaaggccctcaatagacacagccctttgaggctggacttctcaacctccaaaacggtaagaaataaattccttttccttgtaaattactgaatttcaaggtattctgttataaacaacagaaagtgaactaagacaatgatcatacggtctttcattttttctgttaatatggtgaattaacaggtagaaagaaatcctaatcatcatttttgtatatcattatatttgatttgttaatattttattaaaatttttgtatctatgtatggaaaagatgggtttatgctttttttgtaatgtctttcttgggttatggtatgagttatgttggcctcataaaatgcattccttttctgaaggagtttgtataatactgctgctatttcttccttagatgtttaatagaattcaccagtgaaaccatctggggctggcattttctttgtggaaggtttctgataatgaattcaattactttagcagcataagggtattcaatttcttttttatcttgtgtcagttccggtaagttgtacttttccagaaattttaaaatttcatttaagttatcaaatttattggcataaagtaattcatggcattctcttattattcttattattcttcttttttggagtcggggtagagtctcactctgtcactcaggctggagtgcagtggcgtgatcttggctcactgcaacctccgcctcccgggttcaagtgactcttgtgtctcagcctcctgagtagctgggactacaggtgcccgccactatgcccagctaattttcgtatttttagtagagacagtgttttgctgcgttggccagactggtttggaacccctgacctcaagtgaccagcctgcctcggcctcccaaaacgctgggattaccagagtgagccaccacgcccagcctcttattattcttttaacggctataggatctaaagtgaaaatccctctttcattcctgatgttagtaatttatgttctttaaaaagagagaatgtaaattactaggtgtttaccatctttgctgatcttttcaagaaatcaatttttggctttattaattttctttatttcttttctattttgctgatttctgctcttatatttatttattttttcttctaccaggaatagttcttctctttaaagtaggatagaaatatgaaagatgagaaacagtgttgcattcaagatcaatagaaagttcctttgctagtccaggcttaaaagatcttaatttgcttcaagtcccaagccctgcctccataggccaggggctttttgaagagagaccccaacatctcaagggtgtgcctccaccctaatcagtttagctattacctgcagtagtgatttctcaatgcctgctcagccctcactcaccagggcagtatcttcttgtcccttccctcacaaccatcccaggttccttcctttcttcatccaataaggtaatcacatctggtttagaaatggaaggtcctgcttaaaagaaaaatgtgacatggaattatacaccagaaaatctttagatttagatttggttaaatttataattaactacagatcaatatggcactttataaagcctaggagcgaagaattgcaagggagttgaagaatgctcatattaaggtaacttgagggtcacaaggaatagcctgtatgaggttaaattaagtatactaaggccattatattaaccatctggtcaagaacaggccttaatataatttaacctcacacaagctctgttgaaaggcagtattgtgtagagggaagaacacagactggatccagactgcctggcttcacatcctgcctttgtttctgtgttacctagcaaattattaaccttttgtgtctacgttttctcaaataaaatgaagataataatatcttctcatagcgttgttgtgagggttaattaataatgaacaatgcttagaataatgtttaagcccaaatatatggtgatgtttattaacatatacacataatatatgtattagctattagctatttactgttatcattttgatgagtgcatactaaaaggttttttgagacattcccagatcttttctaggatattcattcaatgttaaatgccaggcttttagattttaattttcaattacaaagtaggtagaactgcatatgtctgttacaggaaacagaatgtgtttcagggttttttctgtttgagacagagtctcactctgtcacccaggctggagtgcaatggcgcgatctcaactcactgcaacctcagtctcccagcttccaggaattctcctgcctcagcctcccaagtagctgggattataggcatgcgccaccatgcctggctaatttttgtatttttagtagagatggagtttcaccatgatggccaggctggtctggagctcctgacctcaagtgatccacccgactcggcctcctaaagtgctaggattacaggcatgagccaccatgcctgaccttgaggtttttttgagatggagtctcactctgtcgcccaggctggaatgcagtggcgtgatctcagctcactgcaacctccgcctcctgggtttaagtgattctcctgcctcagtctcccgagtagctgggattacaggcacgtgccaccatgcccggctatgagttttaaataacctttctggatccatctcacactatgttctacagattcctttgatttttagagaaactcagaacccctatgtctaggtattctacttgcagatggtgtgaagcatttatgtcaattctgagctccaatataaggtgaagtctggtttcttgaacaatgcttttgccatattcaaatccatccccttggatactaaggaaatcaggaattacagagtctgaaggaagtctgaagggcatagcagactggacatgatgaaatggagaggcctagttccaacctgacaaagcttaaatcattcctttgagaatagaaagtagttttagagagtttttctaaatatagtcctgaaattgacagcagagaaagctaatatcatttgggataaataaccttacctagtgaaatgaagttgctgtagttctcccacattacatccctatataagtccctctgagcaggatccaggaattcccattcttcctgtgagaagtctatggccacatccctgaatgtcactgaaccctgaaaaaacaaactcaggtattacttgtgaaaataaattaaatacttttaaaatggaaagaggggagattgaggattgcattgcagagaggggtcagatagcatgcaaacagcattgggctgaaaacttgtgacatgagtaggggccagtaagaaaattagtatttctcaagcactgagcctacatgttcttgaatagtcctgtggctatagatatgattacattttcatccaaacatttctagaaatgagtacataacccaaaaaaatcctaattaaatgaaatagtgcacgcaagccttttgaatactatgtgcctccaccataaattctttaaaaatatgaggtcttgaggccaggtgcagtggctcatggctataataccagcactttgggaggcccagatgagaggatcatttgagcccgtaagttcaagaccagcttgatcaacattagcaagaccctgtctctacataaaaagaaatttaaaaatttaaaaatttaaaaaaaaagaaatatgaggtcttgggctctcttttccctttaatgatcatttaaaaacattgataaaaatttatcccacatgtgctacaaaatccaagaagacagattcaaattcatcacaaactcgggttttattataaacactttctcttttataaccaattctttagtaaactttcaaaaattcgttcgatggcagtctacatttttaatatattagattcttttttctttagatattttaattcaataaaatctcgaaagtcttccccaattctcaacgtctacaatatctaatctttatggatgtgaataatcttcttgcttgtcactatctatcatctcttgaacattgtttttttgttcctgagttacaggacactgaatcatgaagatatcataaagatatcacctggacaccattatcaatcatattcttttcttttcttttttttttttttttttttttgagacggagtctcgctctgtcgcccaggctggagtgcggtggcgtgatctcggctcattgcaagctccgcctcccaggttcacgccattctcctgcctcagcctcccaagtagctgggactacacgcatccgccaccacgcccggctaattttttttgtatttttagtagagacggggtttctccgcgt[137 bp omitted]aaagacatccggccatatctggagacaattttggttgtcacaatcggaggaaagggtgtgagtgttacaggcatctaatgggtagaggccagggacactgttagacatcctacaatgcacgggacggccccctacaataaaagactccccatcaaaatgtcaatagttcaggccaggtgcagtggctcaagcctgtaatcccagcactttgggaggccaaggcaggcagatcacttgaggtcaggagtttgagaccaaccttgtcaacatggtgaaaccctgtctctactaaaaacacaaaaatcagctgggtgtggtggtgggagcctgtaatctcagctactcaggaggctgacgcagtagaatcacttgaacccaggagacggaggttgcagtgagctgagatcacactactgcactccagcctaggcgacagagtaagactcggtctcaaaaaaaaaaaaaagtcaatagttccaaggttgagaaatcctgctctagaccagcacatcctgtaaaaatacacaatggacctcgttcctggcattcttctccgcaggaggaaatctccattgattgaggtatctatttgcagtcctattctgatcacatcctattcaccctgttggtgaagaagggatccctgccctaaaaagtacaagacaatcaaatagcccacactggacagatgagattgacagcaatttgttcgatgcatatattcagagcctgagagaggacatcatacatcacgcaggggcacaaggggattgcatttaagaacagcatgaacaagcaggggtatgggaggcaggctttacagtaataacaaggtgaggtgttccctggttcctgcagtggtatgtgattggcttgtttgaataattccataggctagcagggaggtgaaacccattaggttgaggacgacgaggggtgtaactggtctagctcataggagaactagctgggtaggaagcctttcccgctgggtgtgggcatatcgggtaagagcaggggaactcatggttaggcctttagggtcttgacaaagttgtcaaggcacacatgaaagtttaggccttatcttataaggcccaattacatccctacccaatccacctaaaagccttacatagtatagggtctcaacatacataaaaactaaggtcagtcaacactaaatcctatcctatatacttgaaaaactcagatctgtggagaagtttagagttttccctataagcagtcagataagaccaaattctctctttcatcaaatcacagatcttaaggaaagctcaaaatagggacctcccacttaacatcagtaatccattcctgaaaatcagacattctaacgattaaccaggtacctattttcccatcattttatttactttctttccttccttcctccttctttctttctttgctttctttcctttttctttttctttttttttttttttttttttttttttttgacagggtctcactctgttgcccaggctgttgcctaggctggagtgcagtgatgtgatcacagctcactgcaacattgaattcctggcctcaagcaatggcctcccaaaggagggattacaggcgtgagccactacacacggcctcccattatgtgaaatcagagcattataatgagttatatgtcaattccatccctccaactagctttgcacattttcctccaatatagaactatgggacacagtgggtcagtacacacacaacatctttgcttttagtattttaatcatctcttttactaaattcatttttctcatttgcttggtttctttctccacaattttcttcaatacttttccaatcttttaggaactcattttacactagacaaaaatgagggctatatgtgaagcacagtatggaaaagtgtttccaacaagaacgtgatagcgggaacggctgacactcaggatggtgctctgttacctcctcagtcactagcagcaccaggtacacacatgcccttgaatgatagttatacacatttcaaaacatctgcagatggttccattggtctaacaactgtatttgggatataacaagatttttcctggatgttatttttgttttttaaaaaaaagcattgtattggatcaggtgcggtggatcacacctataatgccaatactttgggaggctaaagtgggagaatcacttgagcccaggagtttgagttcagcttaggcaacatagtgggaccccatctctacaaaaaattttaaaaattagccaagagtggtggcacgtgcctgtagtccccagtactcaggaggctgaggtgggaggatcacctgagcctgggaggtcggggctgcagttagttgggatcataccaccgcattccggcctgggtgactgagtgagaccttctgtcaaaaaaaaaaaaaggctgggtgtcatggtggatggtggctcatgcctgtaatctcagcactttgggaggtcgaggcaggtggatcacttgaggtcaggagtttgagaccagcctggccgacatggtgaaaccccgtctctacaaaaaaaaacacaaaaaatagctgggagtggtggtgggcgcctgtaactccaggtactcagaaggctgaggcaggagaatcgcttgaacccagaaagcggaggttgcagtgagccgagatcctgccactgcactccagcctgggcgacagagcgagactctgtctcaaaaaaaaaaaattgtattgaactatatgattccacttgaacaaagttcttgttttgttttgtctttttgagatagggtctggctctgtcatccaggctggagtgcaatggtgcgatctcggttcactgtaacctccacctcccgagctctagtcattcgcccacctcagcctcctgagtagctgcgtctataggtgtgccaccatgcccagctaggttttgtattttttgtagagacacggttttgccttgttgcccgggatggtctggaactcctgagcttaagcgatctgcccacctcagcctccccaagtactgggattacaggcatgagccaccacacctgccccacttgaacaaggttccaaaaataagcaaaattacattatagtgttcgacatcaagacagtggttaccctgggcagtaggtgggtggggagtgactgaaagcatctgaggtgatttcctttcttgacctgatagcatagatgtactcaatttatgaaaattcatccagccatacacttatggtttgtatatttttttgtatatatgtcattcctccacaaaaaatttcaaaaacgttttaaaaatgtcatattgtggccaggtgcagtggctcatacctgtaatcttagcactctgggaggccgaggcaggcagatcacctgagatgaggagttcaagacaatcctgtccaacatggtgaaatcccatctctactaaaaatgcaaaaattagccaggtatggtggcgggcacctgtaatcccagctacttgggaggctgaggcaggagaattgcttgaacccagaaggtggaggttgcagtgagccgagatcatgccactgcactccagcctgggtgataagagtgaaactctgtctcaaaaaaaaaaaaaatgtcatattatgtattggggacacctattttttctatgtaaaactaagacaaaaagcactgtactgagaaaaatatactttttctggagtttaagttttaaaatgaaaagcggttccactggaagatgttaacaggaggacattctgcagagaatgccttcaattttctcaaggcatctcatttccgctttctcacagctattgacagaagattttgtaggtaggagatgctcaacattagtgggagaagagatagccacataggatactgggctatctgtcccaatcctcacaggagggaaaagaactggagtaggttcttttttttttgagatggtgtcttgctctgtcgccccagctggagtgcagtaacgcaatctcggctcactgcagcctctacctcccgggttccagcaattctcctgcctcagcctcctgggcgcctgccaccacactggctaatttttgtatttttagtagagacagggtttcaccatg[135 bp omitted]agtttcagaataaagaatgaatctatatacatgatacagaaattgacagtatttcgaaaaggacagagaaacattaacttacatgggccatggttttagaactgcaaaaactggtcagtccttttcaagatttctctgttggagaactatggagtcctgataagccagagctgaaagaagaaaaagaaaccatgaaataagctgcgccacagagctcccaaaatgatgtacatcataaatatgaaaacttttttctcttccattccttctcccaaactacttccattggcttttccaaagtaccacccaccactatgcccatccctatcctatacccacatataactggggaaaagtatagggagtctaaagagaaacaagctctggccgggcacggtggctctcgcctgtaatctcagcactttgggaggccaaggcagttggagcacctgaggtcgggagttcgagaccagcctgaccaacatgcagaaaccctgcctctactaaaaatacagaattagctgggcgtggtggcacatgcttgtaatcccagctactcgggaggctgaggcaggagaatcgcttgaacccaggaggcggaggttgcggtgagctgagattgcgccattacactccagcctgggcaacaagagcaaaaaagaaagaaatacaagctctgaagaaataggtgacaaatgatgaacttggtgtagaagcctagctacttctgcaagaggatttctgaccaggtcgccctctagcaatgtggatctggtccagacactggattactcagatttgttctgagcagctcctcctcactctaggacaacttttcaggactgagaagggccctgaatcctgcccctagaatcctgcctgaactacctaaacacagcaactaaaagaccacacagattgaacctggcagcttctgccaatgtgaggctacccttgccttccccagccaggaaagctcgccactccagttttccaatcagggcctcccataccatgacatccttcaccactccttctcttttattgattaatttttttttagatggaatttcactctgtcacccaggctggagtgcaatggcacgatctcagctcactgcaacctccatctcccgggttcaagtgattatcctgcctcagcctcctgagtacaggtacatgccaccacgcccagctaatttttatatttttatatttttagtagagacggggtttcgccatgttgaccaggcttgtcttgaactcctgacctcaggtgatccgcccgcctcggcctcccaaagggctgggattacaggcgtgagccaccgtgcccggccccactttccttttagtatccaagctggggacagaagggattcatgattcctgcagttggtcaacaatattcattgagaacctctatgtgttgggtacttcatacacattgtcagttgtcctcggtactgttctgcaatgtagtgctctccttttaatagctcaggaaactaatgcccaggggtcaaatcagttaagttgccaacatttgttttgaatctacatttctctaactaaaaagcccgtttcttttttctttttttggttttgttttttttgtttgtttttgcagacagagccttgttctgtcacccaggctgaactgcagtggcatgaccatggctcactgtaacctctgcctccagggttcaagcgtttctcctgcctcagtcttccaagtagctgggattacaggcgcctgccactacgcccggctaatttttatatttatagtagagacagggtttcaccatgttgcccaggctggtctcgaactcctgacctcaattgatccacccgcctcagcctcctaaaatgttgggattacaggcgtgagccaccacacccagcctaaaagccagtttctctttcaactcaggtatttgtctctgaagcaaggatttctacttcaccaggagaaatctgatcatcagcaattcactaaaaaaaagaggaataactaacagtaggttttgttttgttttgttttttcaaaaacacggtctcactctgttacccaggctggactacagtggcatgatcttggctcacagcagcctcgacctcccgggctcaagcaatcctcccacctcagattcccaagcagttgggactatagttgggcaccaccatgcccagctaataatctttcaaaaaatgctaaatctcagaagatagcaaaatagttctttccatctatggtccacctgcagaaacatcagtttgagcaattatccatcaacaaaaatgccttcacaatagctaaggcaaccaggtgagagatcgcagtactgggttgtagcacaataataagaaaagaagcattgaagagtgcaggaaggacggctcgacattacccatgtcacccctccccagctcaaggcagcacagtgtagacagaggtattgcccacttggggaaaagtcagggaagtgagcacagaactttgcctgttccctaacaccaggcccgccatagtaaaacccagcaacagggagactcccaaccccagactccaggccagtagccacagactgaccctctagacctgctctggcatcaggaaagatcatgcagcccaggcttcaggcttgcatgatgaactccatctccaggctgccaccaccatcaggctgacatcagaggccctgggctccaacagcccttagcaacaggcaagcctcagtggcctctgcaatcaggcacataacagtatggcaccagtcacagtggtctcaggctttgagcgtgccccagcactgcaccagccagagtggccctgggcttggggcatgctatgtgcaacaccagagaatgtggttccagccttttggagcatcccagcactatacccaccgtagcagccccagccttaaggaccaaaccagacaggctgcccagaaccactgcatgggctattgatgggctttcccagatgaacctcattctgcaaagactggaataaatacacagtcctttcaagtgtgcagacatcagtgcacggtcacaaagatcaacaacaatcagggaaacatgacatcgtcaataggacaacataaagtgccagtgattgactctaaagaaatggagatgtctgaactgcctgataaagaattaaaacaggctgggcacagtggctcacacttgtaatcccagcactttgggaggccgaggcaggcggatcacgaggtcaggagatcgagtccatcctggctaacacggtgaaaccccatctctactaaaaaatacaaaaaaattaggcgggcatgctggtgggtgcctgtagtccagctactcgggaggctgaggcaagagaatgccatgaacccaggaggcggagcttgaagtgagtcaaggtcgcgccactgcactccagcctgggcgacagagcgagactctgtctcaaaaaaaaggaaagaattcaaataactgttttaaggaagttcagtgaacttcaagaaatacagagaactttaaaaagtgagaaaaacaatatgtgatcagaatgagaaattaaatagattgaaataatttttaaaatcaaacataaattctggagctgaaaaatacaatgaaggaaattttgaaaatgcaagacagaacatcaacagcagaattgaccaagcagaggaatgaatctgtaaacctgaagacaagttatctaaaaatatacagttggatggaaaaaaggatgaaaagaaatgcagaaagtttataggattcatgggacagcatcaaaatagcaaatatttgagcagtaggagttaaaaagggagaagagaaagataaacaagtagaaagcttatttaaagaaataacagcaggcacagaggctcatgcctataatcccagcactttgggaggccaaggtgggattacttgagtccaggagtttgaaaccagcctgggcaacatagcgagactcatctctacaaataattttttaaaaataagccaggtattgttgcatgtgcctgtagttccagctacatgggcggctgaagcagaaggatcacttggacccagaagttcaaggttgcagtgagctatgatcatgccactacactccagcctgggcaacagagtgagatgaaaggaaaggaagggagataagaaggaaggagggatggagggagggagggagggaaggagggaaggaaggaaggaaggagaaagaaagaaaaaagagaggaaagaaagaaaaagaagaaaggaagggagggaggtagggaggaaaggaggaaggaaggaaggaagaaaggaaggaaggaaggaaggaaaaaagaaagaggaaagagaaaaaaagagtagcaaaaaactttccaaacctggggaaaggtaagtatccaggtatggcccaaagttagaaggaagaaaataataaagattagggcagaaataaatgacacagaccagaaagccaatagaaagaatcaataaaattaagagttttttttttgaaaaaagaaaaaacccacaaaattgacaaacctaactaagctatactaaccaagagaaaacagaaaatattgaaaatattcaaataaaactagaaatgaaaaaggagacattacaactgatacaacagaaatagaagagactattatgaacaaacatacaccagaaaattggataacctaaaataaatgattaattccctgacacatacaacctaccaagattgaattatgaagaaataaaaaatctgaacaggctgggcatggtggctcatgcctgtaaccccaacattttgggaagccagtcattatgacaaacagtatggagaggcctcaaaaaactaaaaatagaactaccatatgatctagcaatcacactactgtatatatccaaaggaaatgaaatcagaatgtcaaagagatctctgcactttcatgtttattatagcattattcacgatggccaacacatggtgtccatcaatggatgaatggacaaagaaaatctgctatgtaaataaaatgtaataccattcagctatgataaagaaacaaaacctgtcatttgtgacaacacagatgaatctggaaggacgttatgttaagtgaaataagccagaaacagaaagataaacaccac[137 bp omitted]catggagaaaccctgtctctactaaaaatacaaaattagccgggcatggtagcacacgcctgtaatcccagttactcaggaggctgaggcaagataatcacttgaacccgggaggcggaggttgtggtgagccgagatggcgtcattgcactccagcctgggcaacaagagcaaaactccgtctcaaaaaaaaaaaacaaaaaaacaaccaaacaaacaaacaaacaaaaacaacttaatctcatagaagtagagagtagaatggtagttaccagaatctggggtagttgggggtggggggaaatggcaaggttgaggagatgttggtcaaacgatacaaaatttcagttacataggaggaataagttcaagagatctattatacaacatggtgatatagttaacaatatattgtattactgaaaaaagctaagacctgtaaagtgttctcaccacaaaaatggtaactatgtaaaaggtaattcatatgttaattagctagatttagacattccacaatgtatatatactttaaaacaccatgatgtacatgataaatacatgtaattttatctgtcaaaaaataattttaatactaaagctcggtattaagaaaatgaccagcctgggcaacatagtgagaccttgtctctacaaaaaaattttaaaaattagccgggcatggtagcgtgcacctgtagtctcagctaccaggaggttgaagcaggaggatggcttgagcctgggaagcagaggttgcagtgagctgagatgatgccactgcactcaagcctgggcaacagagtaagaccccatctcaaaaaaaaaaaaaaagaaaaaaatgaaagaaaaaagaacagaaaaaaatgaaagaaaaaagaaaagaaaaaaatgaaagttaaagcaaacaaaatgtacctttttacaatgactgcattgcaagacctaaaagactgatgatgccctatagtagcaaggttgtggggacaccgacactaggtcggtccacatttagagctatgtgaagcagcatttcaatcctgtaaactctgaatcagaagctccacttctgacactaaagggactgtatctgtacataaagattatgcagagctatggccggggcagtggctcacacctgtaatcccagcactttgggaggccaagacaggcggatcacctgaggtcaggagttcaagaccagcctggccaacatggtgaaaccctctctctacaaaaatacaaaaattagccgggcatgatggcaggtgcctgtaatcccagctactcgggaggctggggcagaagaatcgcttgaacccaggagacggaggttgcaatgagccgatgtcgtgccgttgcactccagcctgggtgacagagggagactctgtctcaaaaaaaaaaaaaaaaaagaaaagaaaaaagattatgcagagctatgctgacagcatggtttataatgaattaatggattaaagttgaaaagaacctaatttcggaatgattcaataacctgttgtttatccataccattgaaaatgatgcaaccattaaaaatgatgttgccttaattttgaatgggtgaagccagtgtgttaaaaaaagaaaataccagcatgtgtagtgtgaaactattttgacagaaaaaaaaatcatgtttccctagcaggaccagttaaaatgtttacagtcacagccagcaacacgcaccaccacattaaacagagtgtgagcctgaaatacccaaatacttcaaataagactttcccggctcaagttctttcagtcttccttttaactgagaaaaaaagctaaggatactgtaaaaacagatgctgttttttctgagtggcttttttttttacttcggcttctcattcatgaaccaactctatgatttaatttgcccatgtgtgttggagtacggcctagaaaagaatggcaaaaagtctctgactgatgtcttctaagcactgaaggcagccccatgctgcttcctttcacatcttcctgataaacaggtttattttgcttctgaaccagttcttttggctaagatgcctatgaagccctccagcagatgttgggtctccttgaccaactggtctcactttgcatataacatcattaaaataaaaactgtaaggcatacatctgtatgaaacccagttacctccataaagaccctgtagcttcagtataatctggacaaaacttgacagtgtgtgccatcatgagattgatatctcttcccttcatcgtgagattgctgaataaagcaggaaggaatttttttttttttttttttttgagacaaggtcttgctttgccacccaggctggagtgcagtagcacgatctcggctcaccacaacttccacctcctgggttcaagcgattctcctgcctcagcctcccgagtagctgggattacaggcgcatgccaccacacccagctaatttttgtattttcttttttttttttttttgagacggagtcgtgcccaggctggagtgcagtggtgcgacctcggctcactgcaagctccgcctcccgggttcacgccattctcctgcctcagcctcccgagtagctgggactacaggtgcccgccaccatgcccgggtaattttttgtatttttagtagagatggggtttcaccg[140 bp omitted]ccaggttggtcttaaactcctgacctcgggtaatgcacctgccttggcctcccaaagtgctgagattacagacatgagccaccgcgcccggccagatttttttttttaagtatgcataatgatgatatttggtatactgttgtaattaccaatatatgcttttatttttctgcatgatattagacaggttactttccagttccccatatgaaatggtgagaactacagtttctacctgaaaggattgttatgagaaataaataagatactacatataaggcacttagagtagtaaataagcatttcataaaagtcagctatattaataaagatgaagaatactacatatgcttcttcccacaattatttttaaaattctactcaggcctgtaatcccagcactttgggaggccaacacaggcggatcacttagatcaggagttcaagaccagcctggccaacatagtgaaaccccatctctactaaaaatataaaaattagccaggcatggtgatgcatgcctgtaaccccagctacttgggaggctgaggtaggagaatggtttgaacctggggcgggtggctgcagtgagccaagatcgtgccaccgcactccagcctgggtgacagagcaaaactctgtctcaaaaaaaaagaaaaaaaaaaaattcttcgcagccctgctcttgataggcaatccttcttgattatcaacaatttacaaaaggagggtacaaagataaaacaaatgtggtaggataccaatttttggatctgggtgatgaggaaaaatattaaattacaacctaacggtaacaaatctactgtgcacttattatgtgccaagcattagctaagggttttgcatatattaattcctctactcagagccatcctatatagcagggtctatcattatcctcattttgcagatgatgaaactgtggcacaaagagattaaataaattgccccaagctcaggcagctttaagtggcaggttgaggactagaacccccctactttagctccataacccatacgactgtcactgtactaaactgcatctcatgagacctgataaatacgtggcctgaaacactcatgctgtcaaaaacttcaagccactttccaaatttctactgtcttcccttcccttctaataaccccttcccttgttaacacagacctctccactaaaaaccccatcgtattgtcactccttaaaagcctcaaaagcagaaaagatcctgtcgccaatcaaaccacctcctttccctgcttttgaactcagggcggtggggatcaaagagacctagtgggtaattccatctaaactgtaaactcctcaactaatcaccatcgaatgaaagttctacgtggtggctcacgcctgtaatctcaacactttgggaggctgaggtggaagaattccttgactccaggagttcaagatcagcctgtgcaacataaggagacctcatttctacaaaaaaatttaaaaattgcgcgtgggaccacgtgcctgtggtctcagctactcaagaggctgaggtggaaggatcgcttgagccagggaggtccaggctgcagggagcgagatcacttcactgcactccagcctgagggacagagtgagaccctgtctctaaaaaaaaaaaaaaaacttaagtaacaaaataaagctctgcagttagcttctcttcaggaggtttacttccagaccatccaaatgattagaaagaggcagctcataagagaaactaaattactgccaaatgctcatgtcaatacctactggaggccgggtgcggtggctcatccctgtagttctagctacttggcaggctgaagcaggagaatcctgcttgaacccgggaggcggaggtttcagtgagcacatcgtgccactgcactccagcctgggtaacagacccagactccatctcaaaaaatacaaaaaaaaacaaaacaaaacaaacctactggaaaggggtaggaattggaatctaccttcatcaccccatcattcactgggaaggaaggccaaagcaccaggtcagtggacaggacatttcaggggttaaagtctaactagctgaagattaactggaacaagcccgcatagtctgacaaaatcatatctattgactggcagaaagggagaaaattccacaggaagggttggaatagaatggacgagagagacgagaaaagctctttcgtaaacggttgagttccagctgaaagattctaaggaggatctaatgacagctgcaatctggaatggctgctgtttccgaggtgagattaggagaggcagggattaatgagatattgaatgcaatcatgagtgtaatcaagagggtatccccagtaataaaatgaaaacagcaaagcaagtctagaacatcactggtaagaaaactgtaatctctcaaagagggagtcattatgccattttacaactactgcaccacctggggagaaatcatgttttctattaattttgcaactggctttatctgtctcttccttcctagcctgattaatgacagagctgcttcattgttcagtccgagctgattttcattccacagaagaggaaagcaaatgcccccacgcccagaaaaaataaaaattacacttcatggaacaaaacggaaacacaaactcatctggatgttgacttgtctatatgcaacagcaatcatttcctcctctccccgctgccttcctaaagaacagcaggattgggaaaggagacgggaatcttgagaccgcgggcctttcctggagccggccttggctgagcaggacacacccccgctagcgcacttgctccctccgtctactgcgcgcaaaacccgatggaaataacagggagcctggaataaagctgaccctttcccgtatcagagcgaaaggccaggtacacgaagacggggctgggatctgtctccgagttccccgcagtttccatgggagggagctcgggtaaagctgtgcaatctgcagttcttcagactgcgtctttttgtttgggggccttcattcactccggggttcctgtatctaactcggagccattccgggccgctggacctgggcggctctgaagcgagaaggcagaggacgcaacagggcacccggcgcccagtcagcgccacaaactccacagctactgcctcctggctcacactgaggtctgcgccgcccccgcgccacccccgcgcccattgcctcggtgcaagcgaccaactcacctctcggagccgacaccagcagcgaagccggaaagaactgcgagcggaggcctgtgggaaatgtagtccgccgatgggagggactggttccagccccaacgggctgcgcggagtgcgcatgcgcgggggccggagccccgggtgcgctcggggcgggaaggccctccgcgctgcgtggggctgaggcgagctcgggcttgcgtttgcttttgtcgctgaggaagacttttatttgtttattttcttgagacagggtcttactctgtcgcccaggctggagtgcagtggcgtgattagagctcactgcagccgcgacctcccgggctcaagcgaccctcccacccgagcctccagagtagctgggactgcaggcgcgcgccaccacgcccaactcattttttaagtttttatagagaccagatctccctatgttacccaagccggtgtcgaactcctgggcttaaaagatcctcccgcctgagcctcccaaagtgctgggactacaggcgtgagccaccaggctcagccgcggaggatttagaaagaagttttggcaccagcagatgcctaatatgtgtactaaacacctaccagttactcactgcatacacccaagcaaggtgtgggcacacatcaggcatgcaatgaaaatactctcaaagcccaccagaacctggagcaggacgtaaacctagaaaggtcgctcgtgctcactgccctctccctttctcccactctgtctctgtctctgtgtgtgtgtgtgtgtgtgtgtgtgtgtgtgtgtgtgtgtgtgtctcgtatctcctgcagttgtgaatgtattgttctactaaaaatacaaaaaattagccgggcgtggtcgcgcgcgcctgtaatcccagctactcaggaggctgaggcaggaaaatcgcttgaacccgggaagcggaggttgcattgagctgagatccgccattgcaccccagcttgggcaacaagagcgaaactccgtttcaaaagaaaaagactaactggagaggtctgtctccaatgagactgaatttgtcctgtcctgcgttccttcaggaaagaaatgggataagcccaccagggaccaccctgaggcatcttctgtatcccaaattctttgatatattagttaatacatgaaagaatttgttctttccttaagaatataaaactttagaagatatttgaaaatgcctcggcaatctggtttcattttgcaaacaataggatatgcatgaaataggagataaatgaaaaatctgagctactttataactactaagaaggtggccagacgcggtggctgacgcctataatcccatcactttcggggggccgaggcgggtggatcacctgaggtcaggggtttgagaccagcctggccaacatggtgaaaccccgtctctactaaaaatacaaaaaaatttagctgggcatggtgacgcacacctgtagtcccagctactcgggaggctgaggcagaagaatcgcttgaaccagggagacggaggttgcagtgagccaagatcgtgcagctgcactccagcctgggcgacagagcaagacgccgtatcaaaacaaaaacgaaaacaaaacaaaacaaaaaaaactactaagaaggccgaaggcccaaagtatttttttaattcaaaatcacggtcctatgtacatgtttacaattaaatttatgtaaggaaatcaacactccattaaaaaaacaataaaaagaattattaaaatagctcctccatattctctgttttgactaagtttttttttttttgaaacaaagtcttgttctgtcaccctacctggagtgtggtggcacaatactgtctcactgcaacctcagcctcccaggttcaagggattctcctgcctcagcctcctgagtagctgaaatgacaggtgcccaccaccacgcccagctaattttttgtatttttagtggagacggggtttcac[131 bp omitted]cactaggggctaaattcttcacaccctctctggtgaggagactgctggtgaagataactaactgtaggtcattttccttgtccaacagccccagagaattaacgcctgacttcactgaggtacgatggagggatttttggaaagggccctgctctgctctgtgtcaaatgatggggcacttggtccaatatcatgctcactgaccttctgaaataggattttcttcagattgtttctcatgtcgtttagtttgaaaaaagcgatttggaccttcaattcatcataatcatgcagaataagagcatttctttcagagagtttcatttcttttcttagtatctaaatctgtactattaatattttcagttgcctctcagacatccgcagtttctcttagtaggaaaaaaaaaaaaaaacccacgtgtcaaatgctccatcatttgacacagagcagtgtcctttgtaaaaaacccttccattgtacctctaaaacctgtcattcta[131 bp omitted]ggggaaatcccgactctacaaaaaaatacaaaaattagccaggcatggtgatgcacatctgtaattccaactactcaatttttttcatatatatatatatatatatatacacacacacacatatatatcatatgtatatgattttagtaactttgaaatcataaaaactaaagatgcctcagcaggaattaaatccatgttatttctcaatatatttctggagtcttcatttattccaaaactatatcttgtggatgtacttcacattaagtttgcagattgagaaagtggcccaacatataccaaaccttgtgttttaatcatttgtggtaatatcgtataatttatgacctcaacttttgttaaataccttcatggcaaaggcactatcagaagctgctgcaaaacctcacaccatcagcactggtgaaggagaaagccgttgctttctgctttcttctgtcttcctaatcttgcatgagtttatctcactggaagaacatagatcacatctggaattctagaggcaagagggtctaaaaattgtagtgctgaggcttccagcctctgtagcacaaaaaagagcatggggcacagaagaatacttataacaaaacaacaacaacaaatgatatccagcacacttggttttttaaacaattttttatttttattttttagagatgaagtttcatctcgtcacccaggctggagtgcaatggcgcaatctcaactcactgcaacctctgcctcccaggttcaagcgattcttctgcctcagcctcccaagtagctgggactacaggtgcgtgccaccatgcctggctaattttttttttttttttttttgtatttttagtagagacggggtttcactatgttggccaggctggtctcgaactcctgacttcaggtgatccacccacctcggcctcccaaagttctgggattacagatgtgagccactgtgcccagccggttttttaaacaatttaatatcatcatttaaaatttggcttttttctcaaaatttctcaaaaaaaaaaagaaaaaaaatttgttttgctaccccaatgctagaaagatactctacattttctcctgaagcccttcttgctttaccttttacgattagatcactcatgcatctggaattgatttatgtatagtgtgaggtaagggtcaagacgaattttttatcaaaacagatacacaactgatccagtgctttttattgaaaagaccaccatttcccaaccacatggccgaggaaactttatcacaaattagacaaccacatatatatagagagagagatctacttcagggctctttattttgttccattggtctatttgttcattcttgctcatcgaacattctggttcattctaacatacctgccttaatgactacagtacaacttgtcacattaacaaactcaaggagaaaaacatcatatcaatgagccaaaaaggcatctgactatatttagcagatatttctaataaaaaaaaaagttaaacaagaactgagacaactgagctacaaaatctatttatctcagacctagagtaaacattacaccaagtaattttcattaaattggagaaaatgaccagatgcctggtatcaccatgaatactaaaccttgttttggagactctattacaataacaataatttaaaaaataatcactatatttagaaaaaaacaaaattatatctatttgcagttgacacacctgattgcctagaaaaccaagagtctagtaaaaaataaaatttaaaagattattaggtaataatgaaagctatgattgtatccacatttaacgtattcatatgacaatatcaacataaatacaatatgggagaaggtaagtccatttataacaaaggactactatctagaattttattttttaagaatcttataattcttatattttaaaagcttttttaaaggaacacaggcaaagacataaattggcaagttacagcgtttagccaatattcagatgtgaaaatatgcccaattcactattaaccaggaaaatattactatgcataccagaagtaaggatataaggaaataaggaaaacatatttcactggttgaagggattgtgcactgggagcatactgatgctctctacttctatgacagtatctagtgaggttgaaagtaaatattaactatgactgagcaatcctacttttgataaataccttagagaaactcttgcttatgtacagtaataaacacagacctattcaataaggtatttttcacagtgagaaaatgcttatcacctaaatattgatcaataagaaagtttaaatacatataatgtatatataaaagataggactagtgggctttctattctattgaaaagtatcattcaaaaaaagcaagcagctggttacaaagcatgatgggagttgctttcctcaccataccagtaatcatacatctgccataatgctgacattttcatcttcgaagtccttttggttatcgcagcatctgccaaagtagaatcacatctgcaataggtattgggaatgggagttctatggtgaagtctgaattacactgagttaaataaaataaaactccattttctttcatattgataggcacataatgtgactttttcccccaagaaatatagtacacagagctctcatacatgtttcacaaaatcatttccttcaagtaggattaagtactagtgttctgtggaacatagtttcagaaattttgagtaaaggtactgtctccagaagacctctgttaatgtgaaaatgttacctaagaggagaaacacattgtcctattagcaaaacctaattttattatagcacttaaaatagtcttcttcatgttacattttactgtttacaaattaaaaaccatgtgaaatcttgggtggacaagatgtattattctagatgattaatgactaattaatgacatctgcccaatctgagcaaactggacttggaggtacaaatcttaatctatgaatagagtgacattacagagatttggttaaaaataaagagttgtggcaatacttacttttattttgtggaaggtgctgtggtttgaatgtgtcccccaaagttcatttccaagtttttgggagaaacttgatccccaatgcaacaatattaagaggtgggactgttaagaggtgattaggccatgaggagtctgcccttaggaatggattaatgttgttaccacaggaatgggtttgttatcacgtgagtgggtttcttataaaagggtgagtttggccccttttgctggcttgctctctctctcaccccctttgcccttccgccatgagatgacacagcaagaggccactcataagatgtcagcctgtcaatcttgggcttctcagtctccagaaccatgagtcaataaatttctgtttgctgtggattactgagtctgtagtattctgttatagcaacacaaaacagactaagacagaaaattggtactggaaaagtacgcagttgctataatgaataactgaaagtgtggaagtggctttggaactaggtaatgggtaagagctgaaaaagttttgaactggatgtcagaaaaagactattgctgtgggtggaatgttaaagggtgattctggtgagggctcagaagagctgtatggaaagtctgaaactttttagagattacttcagtggttgtgatcagaatgttgataaatatagggatggcaaaggcaattctggtgaggtctcagctggaaatgagaaacaaggtattggaaactggaataaaggccatccttattagaaattaacaaagaatctggctgaatttgtgtccatgccttgggctttattggaaggcagaatttaagagcaatgaactaatatgtggtggaagaaatttctaaggaaaatactgaaagagctacatggcttcttttaactgcatatagtaagatgtgagaggtagaaatgatttaaagataaaacataattaaaaggaaggcagaacaaaaagatatggaaaatttgcagcctggccatttatgaagtgaaaaggtgtgtttaggagtgcaaaccaaggttgtatacccagagactgctgaaaagattagtatgaatagaaggaagacaggagctatcaagacagtgggagaatgaccctgaaggcattctggcgctctttgaggctgccccttccatcacagacagcattcactggctcatgctgcctcatgactctgcttcccacatgccagtagagtgcccttggctgccccagccattggttcctgctggctcaggtgtggctcagcctgccactgggcataagctgtaagcttgtggtggcagcatcaatgtggtgctaatttggcaggagtgcagaatgcaagagtcacgggggcatggcttccttcacttagatttcaaaggatgccttgggtagcctgggggcccagtcagatttgtccatgagcagaaccactgcagagagtccccactaggacagtgcctaatggagagaggccatccccaagaccccagaactgaagacctaccagtgtaaaactccaacctgtgacagatgctctatggcataagcccagcaaagccatgggggcaaggctgtctgagaaccagcccccaccccagtgtgtccaagtaggtcatagagttaaggaagggtcttctggagccttaagagttaatgttgtttggctgggtgcgctggctcacgcctgtaatcccagcactttggaggccgaggcaggtggatcacctgaggtcaggagttcaagaccagcctggccaacatggtgaaaccccatctctactaaaaatacaaaaattagctgggcatggtggcagatgctgtaatcccagctactcgggaggctgaggcaggagaatcgcttgaatctggagacagaggttgcagtgggccgagatcacgccattgcactccagcctgggtgacagagcgagactccgtctcaaaaaaaagagttaatgttgtttgcactgttgggttttggacctacttgggaccagttatcccctttttcttccctatttctttcagaataggaatgtctaggctatgcctgtcccactgttgtgttttgggagtaaatatcttgcttgatttcatagactaacagctggaggaaaatttgcctcaggataaatcatgccttgtctcacaatagctgatctagatgagattgaacttctgagtttgtgcttgaaagagttaagactttggggcaatcagaatggagtgtatgtattttgcatgtgagaagaacatgaatttgggaggccagagaagccacgctatagtttgaatgtgtcccccaatgctcacccccaagttttagggaaaaacttgatccccaatgcaatagtattaagaggtgggacctttaagaagtgattggtccatgaggactctgctttcatgaatggattaatgccattatcacaggagtgggttctttatcaaaagatgagttgggctccctcttgccctctctctctcttatcctctctgcccttctgccataagatgacgcagcaagaaggtccttatcagatgccagcctcttaatgttggaattcctacccttcagaactgcgagccaatttctgttcattgtaaattacccagtctgtggtattctttcctttttcttgagatggagttttgctcctgttgcccaggctggagtgcaatggtgcaatctcagctcactgcaacctccacctcccaggttcaagcaattctttctcagcctcccaagtagctgggattacaggcatgcgccaccatgcctggctaattttgtatttttagtagagatggggtttcgccatgttggccaggctggtctcaaactcctaacctcaagtgatccacccgcctcagcctcccaaagtgctgggattccaggcgtgagccatcacacccagccagtattcttttataggaacacaaaacagactaagaaaaaaggtaataatttttgtgttgaattcctatttttatatgtattgttcattccttttgtaaagtcaatgaaactaagataaatgagaatagaaaccatctaaaagatactgtgactgaatcatgtcattttttgtaacattgttgcattgttcaagtcaggaaacctaaaatctggatacatatttaaatgagaacaggccaggccccagggtattcctagtaaatcattttatgttttataattgttttaattgactattgagttcaatttactgatacttttttgcgaatgtttgcatatatcttaagtaaaattggcccacattttgctttttaggaggtatttatcctcatctaattttatattgggatatttgccttatataacgatctagtaaaattttgttatgggttatatattctttaaagctttttactgcctgtaaatctatagattctagtttttaaaaaacaagatcataactgtacatattttcccctttatggattagttcagggtttttttttggtatctggggtcaactttgatcatttaggtttctctagattgaaacatattgaaatatatgtatatagtaatactgaaacattgaaatatatgtatatagtaatatgtaacttaaatttttaaaaaaacctcattatgtagctatttcactttttccatacataaagctgtgagtcatgtttttccctcaataactgccaattctatattaatgttcttttcaaagagaatatccttagtctgttattttattaactattccattaatttatttgatcatataaactacttgctgttattcaccttagtttttaaaaatttctagcttaagttaatccttattttttcccataaattgcctgttatgtgacaggcactgtaggtgtgtgaacagaatggtgaacaacacaaatacttatttctcaatccagatgttctaaatgcattgctttaaattttctaccaagtagagctttggttggtgatttcccccaagttatctgtaggcaacatgtgatcattcatcactaaatagtctacaatttcagacttgattttctttctttttttttttttttgagatggagtctcactctattgccaggctggagtgcagtggtgtgatctcagctcactgcaacctccgcctcctgggttcaagcgattttcctgcctcagcctcccgagtagctgggactacaggcgtgccaccatgtccagctaatttttgtatttttagtagagacagagtttcaccatgttggccaggatggtcttgatctcctggcctcaaatgatccacccaccttggcctcccaaagtactgcgattacaggcatgagccaccacgcctggcccaaacttgattttctactttaaaaaactttattatggaaaatttaaaatatatgtaaagatagtaagaacggcacaatgaaccctgtgtacctaatgatccagattaaacatttaccaacattttgctaatcttgtttcatctatccctcccaccttttgtttttaagtatttaaaagtaaatcacaggcataacatttcagccttaaatacctcagtatgaatctctaacacttaaggactcatacacatatacccataatgccatagtcatgcctaacatatgaacaataaattatttcgtatcatttagtaaccaatccatgtttacatttgtacaatatgtagagacattttattccttcaaatcttgtattgactatgttttctttattttctgtattcctgatgctctggccacttggggccttgatcctggataggctgcccctcccagggcaagctaatgcatagatgataaactccactgcaagcatgcctttcatatacaaaccaaccaatccagagcccatactcccaactatctcctttaccaaactctcatacaccaattcaatattcccctgccctaactagacaattacgaatcccccctagatcccagagaccaacaaaattactcaaactattcaatcctaagcttaccagtgtgcctacccctgccttgtccattccttcccatgaaaacccccaataaaagctctgggccatgctgtgctctcaccctctgcctcctgatacacccaggtgcttctttacgtgaccctgcatgccatgccatgcctcccgtttgtgggatctgcgtataaacttcttccttcatgacaataatttccatgtctgcctgtctcaccatgattgattaaaacaaatcccaagcgcattttaacacaaggatcctaaaatgctccatacactgtatttgaaggatacgtttcttagtctcctttaaagtgtaggattccatttttgtcttttttttttttttttttgacatgtattggttaaaaaactaggccattacttctgcagaatttcccaaattgtgcatttggttgtttgcttctttgtgttgttaatttgttcttttattccccatgtttcctgtaaactggtaattaggtttggagactaacttgtacttctcagttttgggggagccaagaaaacttcacaggtgtccactgtgtgtatccatttcatcacatcaagttcatctggctgatctcatttagagatgttaatatagattagtgtcctgtcattctgctccatgcattataagcttcctatccatttttcacctaatggtcttcgcatccattgctatcaccacgaaaatccatgattttgtaaaattaaagagcgtagttttcaaattctatcattcatttgatctttgttttgttttgttttttgttttttgtttgagacagagtctcggtctgtcacccaggctggagtgcagtggcgcgatctcggctcactgcaagctccgcctcccgggttcaagccattctcctgcctcagcctcctgagtagctgggactacaggcgcctgccaccacgcccggcgaattttttgtatttttagtagagatggggtttcaccgtgttagccaggatggtcttgatctcctgacctcacgatccacctgcctcggcctcccaaagtgctgggattacaggcttgagccaccgcgcctggcctcctttgaccttttaaccagttggaattctctaatcaacaactttccttcaccaacttttggttgtcttgaaatatagtttgtaaaggataggcaaggtaaatattccattcttttcctttatttgttaataatgctctagtatgctccataactaatcaatgcatttggttcaggaaaaaaaaaagctcaaaggttggagtggtcatgataaaaggacacaggagccaatttgaggggattgcctcaaaatgctaaattgacaatttagcatttttaaaaaacaatgaagtagtttaaaaaattaatggggcttcataatacaggtgacttttaatttccaaagtttcatgttatcctttgtcaatttttaatattgactggggccagagaatactgattgtagtttttttttttttttgagacagggtcttgcagtcactcaagctggagtgcagtggtacaatcacagctcactgaagcctcaactcttgggttcaaatgatcctcccacctcagcctcgagtagctaggactacaggcatgcaccattatgcccagctaatttttaaagttttttggtagagacagggtctcaccatgttgcccaggctggtctcgaacttctggcctcaagcaatcgtccttacttggcctcccaaagtgctggatttacaggcatgggccacctcacctggtctagggtatctgttttttaatgaacaaactggaaaggaattccttactttcaatattttaacgagaataagatatctcaagttcaatgaagattaaatgttggtggaaggcatttctatactcattatgcccacagcctttagtatgaattatgtaaaaataaatatttagtatgataataaaagaaagtttagtggcttaaaacaacaaccattttattatatctcatgtttttgtgggtcagaaatttgggccaggggctcagctggtcaattcttccattctacatggcatcagttcaggttaccaagtcgctcactggcatttagctggtggctggtctggtggatccaaaatttcactcaaatgtctggtatcttggtggatgtcaagaagacagggttcagcaggtgcctctccctctctacgtagtttcagggcctcttcatgtggtctcttcagcaaagtagccagactttgtaacaagacagttctgtcatttcatgagatgaagtaaccctaccagtaaagtctgagtcaagaaaccagcacagcagtacgtctaccatattctactgggcgaagcagtcacagagggatgtagattcctgtatacaacagagggatgtagattccacctcttgattgaaagtgtgtcaaactgctgcactcttatatgaccatgtcataaattaaaaaattatagcacagagcagttaagcgtcttgtccagtatgacacaaagtgatgggatagggatgacggtaaatgtctttttcattcttataacaggattagtttttagaacaaatatgctgaagtttcaggtttgagtgatgatggactacaatacattgtcacactcttttaatggtataaaacctctaatgccaacgcagttgcatgtatggagcaaaatagattaattactacattcatagaatgttctataacacagaagttgaaaagactttcttagatttttacattatgaattttcagatgatgagtaaggtgtgaatgttgcctaaaggccttcttacattccttacattcatagggtttctcaccagaatgaattctcagatgttgaataagggatgaattaagtctaaaggccttcctacattccttacactcaaagggtttttcgccagtatgaatgctctgatgtagagtaagtttttggcgcaatctaaaggccttgccacattccttacatttataaggtttctcaccaatatgaatactctgatgctgtgtgagttgtgaaagtagtctgaaggccttcccgcattccttacagtcatagggcttaacaccaatatgaatactctgatgtgaaataagttgtgagtagcgactaaaggctttccagcattccttacattcgtaaggtttttcaccagtatgaattctgtgatggagaataagatgataaccacggctaaaggtctttccacattccttacattcatagggtttctcaccagtatgaattctctgatggagtgttagttgttgtcgcactctaaaggccttcccgcattccttacattcatagggtttctcaccagtatgaagtttgtgatgtactctaagaccagagccacacaaaaaggccttcccacattctttgcattcatagagcctgtcagcactattaagcttctgatgccgagtcaggtgtgcgtactgtctaaaggcttttccacactctttacacacatagggtttctcaccagtatgaatcctctgatgcagagtaagttgtcctcgtaccctaaaagccttcccacattctttacattcatagggcttctcaccaatatgcattttctgatgtactctaagatctgcaccacatatgaaagcttccccacattccttacattcatagagtttttcaccagaatgaagtctctgatgtcgagtaaggtgtgcagtctgtctgaaggccatcccacattccttacattcatacggtttttcaccagtatgaattctgtgatgaaaagtaagctgttggcgcactctgaacgccttcccacattccttacattcatagggtttatcaacaaaatgaagtctctgatgtggagtaacagatgtgcgtttctggtaagaggacaccttttcagatggcattttcacactactgaagtatccttcttgaggtctctcctgtccttcaatttttcctgtggattcccaatcattttttaaaatgagacccttaaggccatggttttcaattctttccattatcttccactgggataaatttatttcataaatgtcattttctaaagataacttcttggtctcatacttggtctccaaatctaaaataaaacaagaaagcaaacacatgctgttttcttttactaaaagaagcaacatttctaatgtagaaataaaagacaacaaaagtaatccttaaccaaaactctaaaatattgttatacaatttggaaagaaaaaaaaagccaaagggaacatcaggaaaaatgagagttcatacaaaatagcaagattggtgatgaagtaaacattttaagtcagtggttctcatattgaggtgtggatcagaatcaccacatagcttgttactaacactgaggtttagacaccacccaaaccacctggatcagactctgcagtcctggaaggatatttaatattctctacatgataattctgatgaagatgagaggtcgagaatctatacttaaatttttttcatctttcttcattctcagaatccagtcaagctcactgtggttaagaaggcctctgcttacctacatcatatgatctcaaaccagtgtcccctttactgctccctggagaggcctccttgcagacctcacatgtcctaacttacttccatctcttaggactcttcacagtctgttctatctcccacaaatctcctgattgggctctttgcatggctggctcctttcatcttgagatcttagattaaaagtcatttcctttaaggttgaccctattgatagtacctaaatccatgttgctattctctattccttgcctttataatagctctcaatttaaaaattatatatttattaacttctccaattgttatactgcctattcttacctataaacctcctcaaggacagaaacaatccctagttaacgctacattaagtaataaatgctaagcatataataggttttactcatttaattcccatagctacatacttgttctaaatgtatctctctgcctctagtctctcatgccttactacagtgattaaatattctctttattcatccagggcagcccagctaaatacaagaatggaaataggtggctgtatattcctatgcatctgccactgcttatgcctttacctatgcagtgcactgcccatttgccccttcacatagctatgggtaactttttctttgtctctacaccatagcaaaggtattgaggagttctacctactcaatcttcccttcaacttattctattactcattcatttgacaaatgttcaactggttttgttctttcctcccattgctcaggttttctcctttccattccctcatagtcaaggccattcctgtttttttaggaaatgtgtatcagtgatttttcggacaggaaaacacgtctatatcttactgaagttcttatgaaattcatggcacaaaaagacaggatatgcctgtaactcagaaatgtggaaaaaagtaatgtgcatgttcaactgttgcagtcatctgaatgtgaaggacttgctaacagaagtcacgttacatgtaggccagaggatggcaagccagcaacaggaacagccagaggaaaatctacaagctgaatgagttgtgtatgagagagaaacaggatgaggttttcaattatgataaggtggtctctattaaaaagctgaaatctagacacaaaactaggagttagcaaaaaaaaaaggttgaaattatatagacattttctactaaaactggaaattaataataaaattaaaagaaacacaagtaaaatctacctgaaaattcaaaagtctatattaaataactcttaggtcaataggaaaataagatctgaaacaatgtttttgatttttgcttgtttgtttgttttttgagacagagtctcactctgtcacccaggctggagtgcagtggtgtgacctcagctcactgcagcctctgcctcctgggttcaagcgattctcctgcctcagccacctgagtagctgggattataggcatgtgccaccacgcctggctattttttttttttttttgtatttttagtagagacagggtttcaccatgttggccaggctagtctcaaactcctgacctcaagtgatcctcccacctctgcctttcaaagtgctaggattacaggcatgagccaggccacctggctgtatttttgtttttttgaaaataatgggaggccaggtgtggtggctcacacctgtaatcccagcacttgaggaggccaaggcaggaagatctcttcagcccaggagttcaagaccagtcagggcaacatggcaagacctcatctctaaaaataataaattggctgggcgcagtggctcacgcacataatcccagcactttgggaggccgagatgggtggatcacgaggtcaggagatcgagaccatcctgactaacacggtgaaaccccgtctctactaaaaatagacacacacacaaaaatgagctgggcggggtgtcaggcacctgtagtcccagctactcgggaggctgaggcaggagaatggcgtgaacctgggaggcggagcttgcagtgagccgagatcgcgccactgcactccagcctgggtgaaagagcgagactccatctcaaaaaaaaatacatacataaataaagtaattaaaaaattagctgggcatggtagtgtgtgctatagtcccagctacttgggagactaaggtaggagaagtgcttgagcccaggaggtcaaggctgcagtgagctctgtctatgccactgcactctgggttgggtgacagagcaagactctgtttctttaaaaaaaaaaaaaaaattaagcctacattttgaaaacctgcatataagtatctataaaacataaccatagtgcttataagaaaatttacaaactaaaatacagcaataaaagtgaaaaacatcgttaaaagtctcattcaaaaaaagaaaataaaattaagctgaagtaaagcagaagaaaaatattaaccgatataaaagcagaattagttagaatacagaaatagaagtaataaagcataaaccaattttttttttttttttttgagatggaattttgctcttgttgcccaggctggagtgcagtggcgcaatcttggatcgctgcaacctctgcctcccgggttcaagcaatcctcctgcctcagcctcctgagtagctgggattacaggcacacaccaccacgcccagctaattttttgtatttttactagagacgggtttcatcatgttggccaggctggtctcaaactgctgacctcaggtgacccacccgcctcggcctcccaaagtgcagggattacaggcgtgagccaccgcgcctggcctcataaaccaattttttaatcaacaaaatgtaagccatggttaagataatgaaaacagcaagaaagcacagacatagaaataagaaagaacaaatgaaaatgatcatgaatacagaggacagatgactatgctaataaatttgaaaacacagctaaaatggataatttgttgtttttttgttttttgagacagagtctcactctgtcacccaggctagagtgcagtagtataatctcggctcactgcaacctgcacctccacccgctggccccccgccacgccccaccaccttcaagcgattctcctgcctcggcctcccaagtagctgggattacaagcacacgccaccacacccggctaaattttgtacttttagtagagacgggatttc[131 bp omitted]tttatcaaaactgatcatggaagagatagatgttaataaaatgtttatatagatcaattcccatagagcaaatagagaatgtgatcagacttaccatcccttttcccaagaataaagctttacaaaacttatttaagctttaaagacaggctatcaaaattctttttcaactaagaagatcaggacttccaaactgttttcataaagtgatactgatataaagatcgctcacaaaaagaaaactacacaccaatattctgaacactgaggaaaaaattctaaatatctaataaaacagcacattgaaagacccaaggggtgtttattacaagaatgttttaggctgggcgcagtggctcacacctgtaatcccaacactttgggaggccaaggtaggtggatcacgaggtcaggagttcaagacctgcctggccaatattgtgaaaccctgtctctattaaaaatacaaaagttagcggggtgtggtggcacatgcttgtagtcccagctacttgggaggctgaggtagaagaatcgcttgaacccaggaggcagaggttgcaatgagccaagatcacgccactgcactccagcctgggcaacaagagcaaaactccatctcaaaaaaaaaaaaaaatgtttcaatggttcaatatggggaaatctattaagacaattcaatataccaacagagtgaaggagaaaaaaaaaatcacacaatcaattccatagatgctgaaaaggtaactaaaaaaagaccaaaactgttcctgaatttgttttcccaagaaacagcgtcaccctctgtcaccacagctggagtgcagtggtgcaatcacagctcactgccgcctctaactcgtgggctcaagcaatcctcctgcttcatgttcctgattttttttaaaaaagctcagtgaaactgtaatgatacttccctaaatgataaagtatatattatcttaccaaaaaggcagcttgcctaacattaccactactattaatgatgtagtattagagttattagtcaacataattaaaaaatcagaaaaaaaaatcagaggtagaagaattagaggtaaaactctatttccaaaggatatgcctgtctaattggaaaactcaaaggtttaaatattataaatggcaacaaaatttagaaaggtagcaggatataaaataaaaatacaaacaacaatatcctttgaatatacatttaacaataaaatatgaggggaaagatctcactcataatacttacaaaaatttaaaatatatggataacctttatgaggaaaacttcgaaacactcatgaagtatttagcattgggtatactgaagaaatcatataccaaatcacaaggaagagattcctgcacagaagctaagggtgccccaccaagggtggtcatactaagaagctgctgagcaagaagcaggtgtggagacagtggcaatacacagggtaactgctgtgttcaaagtggtcagataaacttaaccctcaggttacctctccaaggccagacagcaactactactgtttacctccagaggaggcaacagacaagaggttagggtatcagagatgggtcagtggctggtcatgtcctggggatacagccacagtcgcaggcccaggtgacaaagcaccccacctcacaagaggcaactatgtttgttccaaacaaatttaggtgtgtttcacttttttcctgaaagtatctaatttaatttaataaatgttaaataaattcatgagtgtaaactcatgaataacaaggagaaaacaactgattctatgaaaacaaaattgaacattttggaaaactggtgataaatacagattgctaaaaatctcagctgtcgaaaattaagtgtaggaaatacaatagtaaaaaatgaaagaaaacataacaatcaagacgtattctgcactcatactgcaagtttggttcctattctactttaaaaataaataaaactggaaataatagacttcatattatgtgtgtgatttagaggaaaaatgaaatacaatgagacaatggaaaggaagacttggacactatcaaaaatactggcaaacagacatacatttgaatgttctaagttaaaataatacttttatggtatgtacataaaatatacgacccatttttttatgactaacagacctattaccagtcctaaatctgttggatcaaaggatttctagtccattaaacacttctgatgagaatgtagaaaagtcctttttttgatcaggtaaaaatatataaatacaaaaaatcataaatgtgattcctctttgcagagaaccacctttaattaaacagaaaatgtcatataaatcacttagacttactctatttgggcactgtatcaaccatcttactttgttgatacaagaagttctgggatatagaagatttggttccagggaagtcctatttgcatttcaacacagggataatgtacaaagatctgaaaatagtaaaacccgacatctaaggaactgtacttcggagaatcaattttaatcatatcctgaataagcccatactgaatgctaataatattccattgatgctctcacattctattgatcttctttttcactgagaaaacagcaacagaagaatatgctatcttctctccaccatcctgagcaacctacctgcacacataactacactgtttttcccttttattcccccttactcactggatcctttcttactccagtctcaaggacaattatgcctttctctactgcactgatttcctccaccgatagaatcattcctatgagcacacaaacatgccctaatgtcataaaatacactgctttttaacccatatccccagtgtaactgacaaccctatttcccagcttcccttcatacataattcctccagagttgtcttatactcattcttgttactgcctcacaaacccttctctcatcaagtcactccacttgggctttcatcctgactccattgaaaatctttcttgacaagcttaccaggattctccatcttgctggaacctggggtcaattctcagtcctcattctctactccgtccatggtgaaacatttcctttatttttattttatctcaatggctgccccttctttttttttttttttaatttttttagtggctgctccttctttatctcttttgttgtccctctttccctctttcaaaggtctacagggtggagtgacccatgagtcagttctcgggcctgcctgccttccctagttggtcacatccagatccatgaatgtaaattccaatcatacagacagccaaacataaaccaggctgtaatcgctccaagttccaggtgtacgtattcaactgcctacgcaacatctcaaactggacagataataatcatcacaaacttaaaatatcttaaactgaaactcttagtgccaactttccaacttgctcttcctattttcctcacttcagtaaattctgcttctattcacccagttgtttaagccaacactcatttcttctccttttatatcactccttcccacttagttcacttataatcctatcagcatgttcttttgacagcgccttcatacacatcatgagcctaacagcttcttactacttcctaacaatgccattcttatccaaaccaccaccctgtctaactcaacaactgaaactgcctcagtatcggtgcttcctgcttttgcactcaaccggagaaataattttagaatacaagcagcccgtggctttcaatttctcttagtggttacattaccgggtccttgcctaactctgatctcagcttcttactttccctttccctggtctgaccataatggccgtctttgttattcctcagactagcaaggctaatgccgcactcagaccttttctatcagctcataatgctcttttcccagaaaatgacatgtcttgagcccttacttcatgtctcttctcaaatatcacctcaagaaagtcatctgtccacttttctgaaggcatgttatttatactttaatcaaactttcttaaaggaagaatagaaaagaaagaaaaaaaatacatggtcttgtttaagatgtctaactctgagccaacagttactattttggctaaatgcttcctgactaaatggatattatcttattcacttggaacctctgcaatacattttgagtgttaataattgcaaatgtc[133 bp omitted]acacggtaaaaccccatctctactaaaaatacaaaaaaattagccaggcatggtggcgggcgcctgtagtcccagctacttgggagcctgaggcaagagaacggcgtgaacccaggaagcggagcttgaagtgagctgagatcacgccactgcactccagcctggacagaagagcgagactccatctcaaaaaaaaaaaaaaaaaaagattagggataagagggaaaaagcatgtttttctttcttttggtagaaggttaagtcagaagatagaacattacaaacagtgtaggcactgaaatggtcctatggttataaaataagaactagtaccctaaaataagtgtccttagccagacctgaatatacagagaacaaaatacaaaattacaacatatgtctctgaataaaaacatttttaaagaccttttgtggccgggtgcggtggctcacgcctgtaattccagtactctgggaggccgagatgggcggatcatgaggtcaggagttcaagaccagcctcagcagcatgg[144 bp omitted]gaaaccccaactctaccaaaaaaaaatacaaaaaaattagccgggcgtggtggcgggcgcctgtagttccagcttctcgggaggctgaggcaggagaatggcatgaacctgggaggcggagcttgcagtgagcaagatcacgccactgcactccaggctaggtgacagagcaagactccgtctcaaaacaaaaaacaataacaacaacaaaaaaaattatccaggcatggtggcaggcacctgtaatcccagctgctcaggagaccgagtcaggagaatcacttgaacctgggaggcagaggttgcagtgagctgaaatcacaccactgcactccagcctggggaacagagtaagactccatctcaaaaaaaaaaaaaaaaaaaggccaggcgcggtggctcacacctgtaatcccagcaccttgggatccagcgggtggatcacaaggtcaggagttcaagaccagcctggccaagatggtgaaaccccatctctacaaaaaatacaaaaaattagccaggcatagtggcacacgcccgtaatcccagctactccagaggctgaggcagagaactgcttaaacctggaggggcagaggttgcagtgagccaagatcacgccactgcactccagcctgggcgacagagcgagactccgtcgcaagaaaaaaaaaaaaaaaaaccttttgaaacaagagctgcaaagagagatgaaaacagcacagacaaggtaaacaaaagaccatgagatcattctctctagagtctattatatccatgtttcttcttaatgtgaagatagatgaatacatagatagaaaaatcaaataagaatgatattctgtgaactaggagctatcttctagaataattcatatgaaactttagttgctgataaaacatatatgattatactatcaagcatatcatttttgtagtcttttatttccctttaataatttatgagaaaagttgggggaaaaaaggcttctctgacaactaaaagagtcttcccagcacacatctccatccccttactctgcttacttttcttcatagcactctcattacctgacattgtatttcctatttatttatagttattatgtttctcttattacaaggtaaatttcgtggggatggaaacttgattggttgtttaccactatattgatagtgtctgtgacagtgcccagctccaaggccacctgtctatttattaaagaccgaagtaaaagtcctaaaccccgacagactgaaggaccctcttttggctaaagaccccatgttcctagtcatggcacatggcaggacagaaggctggtcatgacccatttgcttccaatccctttcacctttctgatcattagattttctcaaaagtcagctagagaaaataaaaggctgaaagacccttttgcttacttcatcagaacactcccccaccactccacactcctgtttttatggttccaacatgacagctattccagtccacagcttcttcttgataaacgacttccagccttggactggttttgactggtctcccaaggatacacagatcatggacttgtgtcctacatttacccttttaatgcataggtcctagttataatgcatttaaatgttaaatctctaccctaaagtggccataggacttatgttaacctaatatgcatgtgcacagtctctttcctgagtattcatagctcctcctgtagcctgttgaatatgtatacttggctaacattcagcatacatttctgtcttaccctctccctccctcgaaatgcccgtctctgggcagaagcctaggctacacttcccagtctgtcagaataaccgccttgcaggctgcaatcctttatgaaaaataaagctctcctttccaaatgtatgaactttgtcattcttcagctgacactataaatgcaaaagaggggctgggcacagtggctcacatctgtaatctcagcactttgggaggctgaggcgggcagatcacctgaggtcaggaattcaagaccagcctggccaacatggtgaaaccccgtctctactaaaaatacaaaaattagccgggtgtggtggcacacgcccgtaaacccagctactcagaaggctgaggcaggagaattgcctgaactcaggaggcagaggttgcagtgagccgagattgtgccattgcattccagcctgggcaacaagagcgaaactgcatctcagaaaaaaaaaaaaaaaaaaaaatgcaaaggaggaaagcaactgaatcaaaatatacaatggttgtcaacagtgagccaaagagagcaccaccttacccctcagctccattaaggaggaggaaaactagagagaacaataataaaaaagaagagtggtaaatgggacaaataagtgcttcttttagtatcccccagctaagaccttaatttgctccccatgtcacagacctttcctccttgggccacagacctttcctccttgggccacagacctttcctccttgggccacagacctttcaagagggctttctaaacaacataaggatgtgtctcttccccagtgatctggggttccctgtgttgatggcttcttcctgcccaactagccctcacctggatattgtcttcttcctttcctcacaactttccaaggctcttttccttgctccaatgaggaaatcacatctggtttagaaatgaagcatcctgcttagaagaaaaggaatataaggtacatgaaaataaaaaataaatcaaaattactttgattcagtcttggttaaagtatatgtcaaaacagtaattaataaggcaaaacaaataagtgaaagatgttttaaaaacatttacgttaaggttacacaataaatagagactagagagggaatgaaaaaatctttttaaaatctatattcatataagtgtttctttttcagaggcaatagtggttgagatgacagactgctgggtgcaaatcctgcctgaaccacatcctagttgtatgaccttgggcaagttacttccatgctaccttttccttccctataaaatagggataatcatagtacttatcttatatgattattgttaagattatatttatatatgtctgtatctaaacattgcctagagtatataccaaacactatttatatttcattagctattggttattgttattttgctgagaggaaaaataagctttctgggacatgtattatttcttggatattcaaacaatgttaaattaaatgtaaagttcttggattttaacagctttgctgcaatataatttatataacataaaacctacctaagtgtacaattcaatgatttttagtaaatttacagagttgtgcaaacgtcaccataacccaaacttagaatatttccgtcatcccccaaatatccctattggtcactggcagtcaatcctcattcctactcccagccccagacaaccattgatcttctttttgtctctatagatttgccttttctgggcatttcatataaatagaatcatataatatgtaatcttttgcatctggcttcttccacttagcatagtgttttttatattcttgcatgctataacatgtatcagtagtttgttccttcaatgaatattctattgtatgactatgccacattttatttatccatttatttagataatgtgaataatgctgctgtgaatacttatacatctttgtatagacacatttttatttctcttgagtaaacatttaggagaagaattacagggtcgtatctatagtatcgtacattcccactgcaatgtatgagggttctagtttttccaaatactcactaataattattttgtcttttgactaataattgtatatatttataggctacaatgtgatgttttgatacatgtcattgtggaattagcaaatcagggtaattagcatatccatcacctcaaatatttatcatttcttttctttgtagtgagaacattaaaaatactctcttgtagctattttggaatatacaatatacaatacattattattaactatactcatcttgctgtgcaataaaacacatgaatacaaatcttagatttttaattttcttttttttttttttttttttgagacggagtctcgctctgtcgcccaggctggagtgcagtggcgggatctcagctcactgcaagctccgcctcccgggttcacgccattctcctgcctcagcctcccaagtagctgggactacaggcgcccgccactacgcccggctaattttttgtatttttagtagagacggggtttcaccg[140 bp omitted]gattgtttattaatgaagggaatgagttctcttgaattgtaaatacatgctgttgatccattttaccactacataaatcatatgtattattttgatagagctaattcaataaacaggatctagctatttcccttacaaaatataccaacaagcaacaaaacatctaaagcagttctgaattcaaacacaaagtgaaacttgttttctttgacgctggtgaggctacaaatcacaaagatctcaaacccagccccttcattattaaggcccaagggctacttaaggatggggaaggtcaatgtgcttaatgaaggtgctcacttccaatgaaataaagctcaaagtgttccctttagaaagtggagcaaaaatttagatagcttcctaaaagatactcttgaaatttccacaggaaaaagctgatttacagagaacacagtctaaattcctagaagcagataaccttacccagtgagaccaagttgctgtagttctccaacatgacatctctgtacaagtccttttgttccaagtccaggtattcccactcttctggagagaagtctatggatacatcactgaacatcactgatcgctgaaatgacaaaccacacattataaatgaaatggaagaaaatgtattttaaggtagaaggagaaaagaaggaagagatattgcaggaagtggatcatatggcaagaaaacaggcttgggctggaagcctgcaacacagcgagtcaggaaatgagtgtgcctgaagcaaagtgcctgggttcccgaaggattctgttgctacagacacagactcttatactctggcaaatcttaataatctagatactcctgggaaagaaaaaaaaatcagttttccaattaaatgaaatactgtatataagcctttgcctactatgtctccctcatcaattcccaaggaaggtgagttcttccgcccctttcttcttaaagaacagatttttttttaaagtctccctccctacaatatctttatcttagaaaaggatctaaatgcaattagagaatatcttctaagtttatcctagaagcagatcatatcataagcatttttctaattatgactgttaaaaattggttgtataggccaggcgcagtggctcacacctgtaatcccatcactttgagaggccgaggtgggaggatcacctgaggtcgggagttcgagaccagcctgaccaacaggagaacccttgtttctactaaaaatacaaaattagttgggcctggtggcacatgcctgtaatcctagctactcaggaggctaaggcaggagaatcgcttgaatccaggagcagaggttgtggtgagccaagatcacaccattgcactccagcctagccaacaagaacaaaactccgtctcaaaaaaaaacaaacaaaaattggttatataatagtctatacaatgcatatatgagatttaatcattcttttatacttagatattttggttggacaaaaccttaagatcctcctcaattctgggagtcaacgtgactacttatgtacctggattaccttctcacatgctatcactttccatccctcactgtatgccttcctggttcctgagttaaaggatattaatatagcataatccagaatcacaaagatgtcattctagaccagcacatcctgttcaaccaaaaatggaatcttgttcctgagtgtaactcaggaattccaaaagatctcagatctctctataagacctagccacacccctactcagtcctaaaagcctcacaaaacatgagatcttatgatatactgaggctgaggccaactaacagcaactcttacctttttgttttataactttttttttttaagagacagggtctccctgtcacccaggctggagtacagtggcacatccatagcttcattggagcctcaaactcctgggctcaaacaatcctccatgtcaacctcctgaacaggagggattacaggtgcaagccaccatgcccagccacgacccttatcttacgtacttggaaaactcaaagttcagttttcctatgagtggctaaatgggcccatggtcaaatatttaagagatttcatttttcctccattgcagcttttagcagaagactgagcacatataggagatgctgaataatttgttcaacaaagataagaacaatgactagaataaagagtgttcataggacaagcattgtggttcacccgccactggatttggaagaactggaagaaggttcttggatggagctctgatagtaaggaagtttcagaataaaaaaatggtcacagaaccttaacatgatagtattcctaggaggagaaaaaaacttacaagggccatggtatagaaattcaagaactggtcagtcctccttggggtttacttgccaggagaagcaccgagtccacagaggctgatctagggagaggaaaacaaggccatgagatcagatggacctcagaaatccccaaatgatttgagttactgtgacctttcccctctcttctgatctctccaccacagctcctccaacacacacgcgcgcacacacacataggcagagagagagagagaaatttgagggagtctggacgagtctaatcccttgctaattccagggctgataaggggctgtatcatctaaaccacaatcttccttcttcaaagtttcataggcctgtttagattcaccagacacaaagagagaaattcataaagaccaagcctggcagccattaccaccacaaaactgcacactggcagccctgcttgcagccagaacaactttcaaaatcctctgggctcatcactctctctttccagtcagaatcagaatcatccacattgttttctggaatgaattcatttgccattctctttcttacaacctaggctgaacaggcatggattcatgctcttggtcatttgacaataacaaatgtctatttatcaagaattccagtatgttgggtgttatatatgtatgtgtgtgtgtgtgtgtatatgtgtgtgtatatatatatattttgttgttgttgttgctgttgtttgttcttgtttttgtttttttgagatggagtcttgctcttattgcccaggttggagtgcggtggcacgatctcagctcactgcaacccccgccacccgggttcaagcaattcttctgcctcagcctcccaagtagctgggactacaggcacgcaccaccacgcctggctaatttttgtatttttagtagagaccaggtttcaccatattcaccaggctggtctcgaactcctgacttcatgatccgcccgcctcggcatcccaaagtgctgagattacagatgtgagccaccgcacccacccggcctgttttatatatattaactatatcctcaggattgctctttagcacaataattattctatccatgcaatggatcagaaattcacatgaagagaaataaaaccacttgggctgggcgagatggctcacgcctataatcccagcactatgggaggccaaggcaggtggatcacctgaggtcaggagttcgagaccagcctgaccaacatggtaaaaccctgtctctactaaaaatacaaaaattagctgggtgtggtggcagacgcctataatcccagttactggggaggctgagggaggagaatcgcttggacctaggggggcggaggttgcagtgagccgagattgcgccattgcaccccagcctgggagacagagcaagactccatctaaaaaaaaaaaggaaataaaatcatttgtagaaatgcagtttatgagtagcaaagctgcatttggaatcatttatctaaccatagagtcggctttccttcaactctagctcttgtttctgaaacccagaatttctattccagtgagcgaaaactggcatgcatgattcactaaaaaaaaataaaataaaaataacacatcagctcaccaacaggtatctgagtactgatacccatatttgcaagcatgagaggaaatgaacattctaaccagtatactgcagactgcatagatttcaaagtatgtacaagcagcatttaaaccacgcatactctttgattcagaaattctactttggggattaaaaaaaattgtacatatgatcaaaggtatgtgtaacagtatgttgaccttgttcataatggaaaaaagctgggaagaacctaaatgtccttcaatagaaaacagattaaataatcctggctaacatggtgaaaccccgtctctactaaaaatacaaaaaattagccgggcatggtggcaggcacctgtaagcccagctacccgggaggctgaggcaggagaatggcgtgaaaccaggaggcggagcttgcagtgaggcgggatcatgccactgcactccagcctgggcaacagagcaagaccccgtctcaaaaaaaaaaaaaaaagaaaacagattaaataaatcataaagcatccatagagtaaaacaaactgttgccatttaaaaaatgataatgcagctctttaactggaaatatggaaatatgttcagtacagtttgttgagtgaggagtgcagtaacaaacagttgtgagtagtatgatcctgttaaggtacagcaaaaacagacgtgagagaaacagagagagagagagagagagtgtgcgtgtgtattaatctctaagtgctaagttttagaaaatacacaaggacatataaaatattcaagatatataatctcttagaaaaataaaatgaacattattaggacatctgtaaagtatacatgcaaatcagcacaaagaaacactgacaggcatcaatagatattgatcttgatttccttttcgcttacatttatttcataattctacatgaccatatatacttgaaacatatattttaactttgcatagtggaaagcgttctttaaataggttaaagagatagtttttaaagtagtcatcccttgaacttggagaaaaaaactcaatatcctacaagcagcttctatgtttttactggttttgttgatttcagctcccaaaatctgaactgactctatgatttctaagtgtgttcatgtatgtcagagttctgcctatataaacatggctaaacatcttcaattaatgccttgtttcactgctgctacttctcatgacttcttgaccaagcttttgttttgtttctgaaagagttgttttagccatgaggcccacctaggagctgctgaatcttcttgtgctgttcatttgcatcaacatcatgaaaataaaaactataaggcacatgcttattacataaaatccattaccccacaggaaccccatgagtttggtattatttggtcgtgacctgacaatgcttgctacaatcagctgtctgcttcccatgacctctcaagccatgccacctgaattcttcaatgactttacctcacctatctcagtgttattcttgcataggcttatctaccttgaaagacaacaaacaatgtaaggatatcaaccatgtcattttggtcactgtatttcccccaaggactggcacaggatctggcatattgtgagtactttataaatgtctcataattcaacccagaaattccacttttaggaatttatcgttaggaaatatttgtaaaagtatacaaagatgtattgcaagagagttcatcaaagaataatttattggccaggcatagtggctcatgcctgtaaccaacactttgggaggccgaggtgggcagatcacttgaggtcagcagtttgagactagcctcgccaacatgacgaaactccatctctaccaataatacaaaaataagctgggcgtggtggcagacacctgtaatcccagctacttgggaggctgaggcaggagaatcacttgaatctgggaggcggaggttgcagtgagctgagattgcaccactgcacttcagcgtgggcaacagagtgagattctgtctcaaaaaaaaaagaataatttacgacaacctgaaatcaaatacctaacagtaggcaacaagttgaataaatgatgttctactatattatagcacattatgcaattattaatgatggcattggcccacattaattaaagaaggaagatattcatgataaattactagctatgggagtcagactaaaagaatatgtacaatgttgggaggtggcagactctcagttattaaaaatacaggctttgttatcaagattcaggatatgaacagagctctgagaattattaactgtgagaatttggacgcattaattttcagtgtctcagtttcctcagatataaactaaggaataaacagtacctaccttatagggttgttgtgaaggttaagaacataatacataaagcacttaaaatggcttactgtaagcactaaattcagtgaaaaacatcacatacccctcattccactattttaaaaattatcttcaataattttttttttttttttttgagatgcagtctcgctctgttacccaggctggagtgcagtggcaagatctcggctcactgcaagttccacctcccgggttcaggccaatcgtctgcctcagcctcccgagtagctgggactacaggtgcccgccaccacgcccggctaattttttgtatttttagtagagacggggtttcaccatgttagccaacatagtctcgatctcctgacctcgtgatccgcccgccttggcctcccaaagtgctgggattacaggcgttagccaccacactggcttcaataattttcaatttaaaaatttggtatttgctgataaattatctttaacaatttcaatagcagtccctttctctaaagggatttttgagatttttgagatttttcagcattgctcttaaaacattgataaatgttagaactaggcttgaaaatgtaattctacttttttttttttttttttgagacacaatcttgctctgtcgccaggctggaatgcagtggcatgatctcagctcactgcaatctctgcctcccgggttcaagtgattcccctgcctcagcctcccaagtaactgggactgcaggagcatgccaccacacccggctgattttttgtattttagtacagacagggtttcaccatgttggccaggatggtctcgatctcctgacctcgtgatctgcctgcctcggcctcccaaagtcttgggattatagagatgagccaccgcacctggcctatgtaattcttcttaataatgttatcaaaaaaggattcacagaaatcaaaaagtagagcaaggcccctgttactttccatccctagtagctccaaagggacaccattccatatcataaaaccagctcaagaattttgctttgataaggtatcatattaaatactttttttttttttttgagacagtttcgctcctgttgcccgggctggaatgcaatggcaagatctcggctcactgcaacctccaccttccgggttcaagtggtcctcatgcctcagcctcccaagcagctgggattacaggcatgcaccaccacgcctggctaattttgtatttttagtagagacagggtttcaccatgttagtcaggctggtctggaactcctgacctcaggtgatccgcccaccttggcctcccaaagtgctggaattacaggcgtgagccaccaggcccaacctctttttcctttttcaaacaaagtgttgcagagtctttgtctccttaaatgatcaattgttgtgattctattttggaaaacaaacacatgtgcacaagtgcacagaaaaaaatggaaaagcaaacattagaatagtaatatttattgtggatggtgagactacgggcaacttaaattttattcttatagagtgaagatgactgggtggtaggggatggagaaaatctgttctgaatagtactaaatatagttggcagcttaaaccaggactttcttttttttttggagactgagtctcactctgtcacccaggctggagtgtaatggcaggatctcggctcactgcaacctctgcctcatgggttcaagcaattcttctgcctcagcctcccaaatagctgggattacaggcaggcgccactgtgcccagctaatttttctatttttagtagagacaggttttaccatattggccaggttggtctcaaacttctgacctcaggtgatctgcccacctcagcctcccaagtgttgagattacaggcgtgagccactgcgcccagccaattaaactattttcatacacatagaattaaaaacagagttgtgaagaaggaatatcttttagttgttaagaaaattgtgattctataagcctgtgacatgagtgggttttgggaaaataaacaacagtgtggcacaaataagtaacacccatcagttctttaactgttcttcatcaaaacgatgggctattttcactctcaagattcttctatgaatgaacacaatcaagcgacattcctaaattcagtaaaagtataccaaagcagacagaacagtgtggtaaacaacagtttatctttttttctccactaagaaactagttttatattatgtataatccttgcaaaatgttttataaatctctagcttattaagagcgattcatacatgattaaaggttttgtgagtcatcttgttcaaaactattgcttagacaacatcgatcacaagctttttttccttctcataattaacagtatttattaatggcaaaaagctgcatcacatggagtgtggcttatttaatcatttcctactattagacactaattttgtgtctaacattgaaaaacattctcaaaggttacagactttgattctaggccagtagatctgaatcttaatggatcatgtttgataatctcattaaattacatattttctccccataaaagtggcatattaacagatatctataacaattttacgtacaatttcaaagagtatctggtcccctgaaagcctcaaatgaattcaaattacttctggttaagaattcctgttctatggccgggcacggtggctcatgcctgtaatcccagcactttgggaggccaaggcgggcagatcacctgaggtcgggagttcaagaccagcctgaccaacatggagaaaccccgtctctactaaaaatacaagattaggcaggcgtggtggtatatgcctgtaatcccagctactagggtggctgaggcaggagaatcgcttgaacctgggaggcggaggttgcggtgagctgggatcacaccattgcactccagcctgggaaataagagcgaaactccgtctcaaaaaaaaaaaaaaaaaaaagaattcctgttctaggctgggggcggtggctcatgcctgtcattccagcactttgggaggccgaggcaggcagatcacttgaggccaggagtttgagaccagcctggccaacatggtaaaacccggtctgtactaaaaatacaaaaattagctgggtgtggtggtgcaggcctgtaatcccagctacttgggaggctgaggtataagaatcgcttgaaccacggaaagggaggttgcagtgagctgagattgtgccactgcactccaacctgggtgacagagcaagaccctgtctcaaaaaaaaaaaaaaaaaaaaaaaaaaagaattcctgttttagactatttaagcatctgatctggctcatttattttttactaggaaatactcaccacaattggcttagtattttcattttccccccatctatagaaggctgatgtagaattgctccaaatcactacttaagaatacataactaaggtttattaagtactaacgaggtctcaggaactgttctaagaactttacacatagtaattaaaagaaggcccacagaagtaatgaaaaacatctaccaaatgggtatgtgcatacaggctctcgggaggggacctaggtatcagctcaatggacaggacatttatggagaatgaaacaaatattctcatgtcctaagaaataagaatgcatttcacagaagaaagcagaaacacccactcgcctcgaccttgacttaaacaggcaacagcaattcattcctcctcccgctcggaccccttttcttaaagaattgggcaggactggctaataagggaaccaggcttttcttgcagcccagcctcgcatagggcacaatgcccccaccgcccacccacacataaccagagtaacataagagagatggtgttgttaactcttcccagtatcaaagaaaggccagggtcatggatgcccggggctagaactggagttcacaatagcttcctggaagcaatgctgtggttctgaaacctgcagctggactcttcagagttgtgagtgcacgtgcgtgggtccgggtccgcgaggaggtggtgtgggagtcccttccaggagcaagcctgggcgggagcgggggctcgttcagttctaatattcctatcccaaggtcgggtctgagccttgtttcgctgttgcccaggctggagagtagtggtgctatcatagctcgctgcagcctcaatctcctcctaggctcaagccatcctcccgcctcagcctctcgagtggctgggaccacaggagcacgccatcacacccggctcattttttaaatttctggtacagatgggagtttcgctttgctgcccaggctggtctcgaactcctggcttccagcgatcctcccgcctcgctctcccagagctctgggattacagatgtgagccacctggtccggcctagtctgcgcgtttctgctgggagtctttggcgtgcagaaactgaccgagggccatttctctgcagctgggcccggtgtgggcagaggatgctggggtcagtcacgcactccacggccacaacaaccttcgctcatacaatagtctctgcacccaagtcagccgcacagactccgtcacgtcccagccccggccccgtcacgcccacgacacacacacccgggcctgaggcgcgggctcccgcccctctgcgatactgcagtggccccgcttacctctctttaccccctgggccgcagcgcttttcctacagattaccaggaccgacgctccgggccaggactgctcactcggggcgcgaacccgaggcacagcgatgcccgaacggaggaagccgctgccgggtcacgccacaatccccggggcctaacgggctgcgcgcggaggctgctgggagggccgggcgcgctcacggagtgcgcaggcgcggccagtctcaagggtccgctcgctggtgcagcccctgctctgcgtgaacccggagccggagctaggtccgtcccagcgaggctgcgcttcgagtcccttagcgcctggggacggcgcggcagggcctggaggggagcggggacagatggctggcgcgttaaagaggggcgcccgcgaccgcctctctatagtgccaactagggagccctgtgagcgaggacggcgctgcgagtctgtccctggcgcgctcctgggtgggattctttcactgggtgtggctgttgggatttgagaccgtgtgactccggagattcggggaagccagttcctatattttccatttctgtatttttaaatggtaaaaacaatgaaaaggagaacaatattttgtgaaatatgaaaatcatacatgtcaaatttcagtgtccataaataaaagttttattggaacatagccgtgtttgattgtgtactgtctattgctatatttgagctacaaggacagactcgagtagttacacagaccagatggcccacgcagcctaaaatacagtcagttctcactattcacagtagttatggtctataaacttgctacaaacacggaattagtgaataccattccactgcttctaggggaaatacagggttagtttcctgtaagcatctggtcacattttagtcaaccgatgaatgcataagcttattttattgtgtttattttctttttttcttttttttttttttttttgagatagggtcttgctctgtcacccaggctggagtgcagtggtgggatcttggctcactgcaacctcctccgcctcccgggttccagcaattctcctgcctcagcccccagagtagctgggaatacagatgcatgtcaccatgcccagctgatttttgtattttgtagaaacggagtttcaccatgttgaccaggctggtctcaaactcctgacctcaggtgatccacccgccttggcctcccaaaagtgctgggattataggcatgagccaccgcgcctggccttattgtgtttctatttaaacactttaatatatattattgattcattaacattgaactcatggccaacagctccataactcatgcctgaatgaagcttatctaacacatgtattttttctgtaagacacatgaccgctttctcattcataggaacatcaacagcactttagtactactacatttggggtccctttgaaacagcaaaatcaccagcaaaaaacaaaaatatgagaagccaaggtactaaatggactgcaaaaagggtacctgtttacagtatgagagctgaaataagaagatagagggtcactttgtttgactttggctgagaacatgcctgttaagggactcaaaaaggttcaccgctcttcggatgtccacaaatgaccacaaaggtgctgcaaatattgactctgggtttataaaaaagttttagcaagtagatgaattcacaaattcagaatctgtgaatgaagattgactgtatttactatcaggccctttaaagaaaaagtttgccaatccctgtttttatatgtccctcttagttatacagctagtgtttaaaaactacttgaaataattattttccctgtgccaccaattatgtctataattgattgtaccccattaaataagcacaaagaaaaaagaaagctttctttatagaagaaggccagctaataactatcaagggtttgattttacgtggcttagacacgctgcttcaaatgcatttaagatgtttggttttaacaaggattttgcaacagtatagtgttttccttaagttcaatgtcatttctatgtcatggcagctgtcacctgcagttaggtaagacagtgacatcattaacatggatgcattttcatggcatgaaggctagccattgatggggtaatataacacaatttatcagtaaacgctgagttttctttgaagtcagtctctgatttcttacagtgcttgatgtctgccttgcctgctagtgaccaattcccctgcgtctttacagagccttgttactcactcagtgtaaagacagtgggggaaacaaggtttcccaaagtatccttatgtgcaaaagtgtttcttactactttggaaatactaagctgagtttaatgtttattctttttctaccaacagacacaaaaaggacaagcacatgccttagaatattcaatacaattttctacagcgatatggttaaatactcttctgtcttcactacttttttgtttttactttacttggaaattttaattctctaggaataacggggcaggagtctaaaataatactttgtgggagtgaagtatatatttttttccaagtaaaaaaaaaaaatcaggccaggcgtgatggcttaggccaggcgtgatgactcatgcctgtagtcccacatactcggaaggccaaggcaggaggatagcttgagcctgtgagatcgagattacagtgagctatggatcggccactgcactccgggctgggcgacagagcgagaccctgtctcaaaattaaaaaaaggaaaaaaaaaaaaaaaaaagtctgcgctccccggggcccaaggagaggacccaggagaggagtctggctccttttgcctcagacgagtccagggcgccgggttaactggtctaaagtcccaggcgctttctgggactgctcagccaccggccgctcccggcaccaggggacgccggacgccctctggacaatcggcgcacttgccacgatcttggacgggcctcgggcctcgaccttaagattccccgctccagctccgagatgtcagcaacgctgatcctggagcccgcgggccgcggctgccgagacaagccggtgcgcatcaccatgcgcggcctggcttcggagccgctggacacgctgcgcgcgcgtccctgcgcgacgagaaggctgggctcttccgctactgcgccgacgcccgcggcgagctggacctggagcgcgcgcccgtgctgggcggcagctttagggggctagagtccatggggctgctctgggccctggaatccaagaaacctttttggcgctttctgaagcgggacgtacagattccctttatcgtggagttggaggtgctggacggccacgaccccgagcctggacggctgttgtgacaggcgcggcacgagcgcgacttcctcccacaaggggtgcggagcgattcggtgcgcgcgggccgggtgcgcgccacgctcttcctgccgccaggacctggacccttcctagggatcattggcatctttggtaatggagggagcctgttggaatatcgagccagcctccttgctggccatggctttgccacgttcgctctagcttgttataactttgaagatctccccaagaacgtggacaacatacccctggagtacttcgaagaagccctatgctacatgcttcaacatccccaggtaaaaggcccaggcactgggctttggggcatttctctaggagctgatatttgtctctcaatggcctcattcttgaagaatgactcagacacagtttccatcaatggatccgggatcagtgggaacagaggcataaactgtaagcagaatagcattccaccattgggctatgacctgaggagaatcaaggtagctttctcaggcctcgtggacgtcgtggatataaagaatgatcttgtaggagggtataagaaccccagcatgatttcaatggagaaggcccagggccccatcattttcattgttggtcaggatgaccataactggaggagtgagttgtatgcccagtctctgaacggttacgggcccatggaaaggaaaaaccccagatcatctgttaccctgggactgggctttacactgagcctccttacttccccctgtgcccagcttcccttcacaaattactgaacaaacacgtgatatgggttggggagccagggctcattctaaggcccaggtagatgcctggaagcaaattctagccgccttctgcaaacacctgggaggtacccagaaaacagctttccctaaattgtaatgcgtttgtctgttgttgacatgagagagtcaagatcagattctagtgttcaataaccctatgtgaatcagctgtctcctggataacatt[137 bp omitted]gaaaccccatctctacaaaaaatacaaaaatcagccaggagtggtggcgggcacctgtgatcccagctacttgggaggctgaggcaggagaatcgcttgaacccgggaagcggaggttgcagtgagccaagatcatgtcattgcactccatcctggaagataagagcaagattctgtctcaagaaaaaaaaaattagtaaactagaaatctctgaacaaagtatcatacatgtaatttaattttcccatagatataggtaaagagaagttgttgagttacagcctctatctagcacagcaatctcctcaaaacacaaggtagccgcccggagaggccacagaggagatatctaagagatataacactggggatgtttgcaattggaaattaaatgacattttagaaatgtagttatcaatgtcaagccttgatagacatcagtctgaaacctaatacatgttttatatataataaatttaaacagcttaaattctcatccattcaaaatgggagaaaaactaagtaaatgtgataaatgtattgaggtgtttggctttcaatcaatgcttcctgatactcgaaaagtcttcacagggaaggaaccaaataaatgcagagtatggaaaaaatgaagccatacacatattattgtgtggtaaatatttccattgaaagtcaaatctttacactcaccgaagcatttccataagagaaaagatgtatattagaaatgtaaatgtttttatagcaattgaaatctttacagaggtagagaaatctggtaactgttattagtgtagtagggatttaagctaagttcttgtctcatggtagtcatccaggttcttgatgttttgaacaaagaattggacaaaatgcacaaagcaacaaaacaatgaagcaacggaagcacagatgtattgaaatgaaagtacactctacagagtgggagcaggaccaagcctcaaagagtgctggttacagaatttcctggggtttaaataccctctagaggcttcccattggttacttggttacaccctatgtaaatgaaggagtggcccacaaccagtctgattggttgcagaagacaggaccaatcagagactaaatagtagttaccaagttacgccctatgcaaatatctgattgattgcgggaggggaccaatcagaggtactttccatttttcatctgccacacagtgcaaaggtagtaacctctgatccttttgttatttgggtgtggagagacggggttttccttttgattcagttctaagaagtcagcgggaatggccttaggttccctgcctccagacctattctcctgtctcacctccatttatcactaaagagttcacaatacatgaccctccagaaaagagacatgtgacattaatatgtcagactcaaccagtgtcttcacactggaatgactttattagtgtgaagctggagtaacattttatcattagcacagaacgagaagcattgcagatgatagagccttttttggtcaccaagtgacgcagccagtacactgttgactagcagtgatggtagcaggccttcttgccttggtcctgatcttaaagggaaagatttcggtatttcatcactaagtaaaaaatgtgttgttggttttttgaaacagggtctccctctgtcgcctaggttggagtgcaatggtgccatcagggctcactgcagcctctacctcctaggctcaagtagttctcctgactcagcctcctgagtagctgggacaagtaccaccacacccagctaatttttaaaattttttgtagagatgaggtctcactatattgcccaggctggtctcaaactcctgggctcaagtaatcctcctgcctcagcctcccgaagtgctgggattacaggtgtgaggcaccatgcccatcaaaaaatgcgcttaaatttctccctggatatcctttcttagaagtttccttgtatctctatttttccaagaggcttgatgataattggatttgaaattctatcatcttttctgtatcttttgagatgatcctggggttctttctaaattaatacgttaatgtggggaatcatattaactgatttttaaataataagtcaaacttgcatttctggaataaatatctcaagttggtcataatctagttggctaaaaattaataaagttgtttccttaatgatttagataagaactttgcatctaccttcatgaatacaactaccccataattttcttttctcatactgtctttgagagattttgaaatcaaggtgatattttctttctttgatttttttttttgagaaaaagtctctctctgttgctcaagctggagtgcagtggcatgatctcagcctactgcaacctccaactcctgggttcaagagattctcctgcctcagcctcccgagtagctgggactacaggcacatgccaccatgcccagctaatttttgtgtttttagtacagacggggtttcactatgttggccaggctggtcttgaactcctgacctcgtgatccacccatctccacctcctaaagtgctgggattacaggtgatcatattttcattaaagaagtcactgtttctgcctttttattctctgggaaagtttactatgtaaggttggaattcttcttaacttgaatgggttggtagaacttttcaattaaatcatttggaactgaaattctctttctgggttgctgtttgctgatagtcattccaaaaacttctatgccaaaaaagccacacactaggtatcttggttcatagtttactcagtgtaacacataataaatatctccctgaagccaaggaagaggccaccttccacccttcagggaacagcagtgagttcagggaacagtaatctctttctcaattccagctggtcttacctatagttcttgtgtgccagattcccttttgtatgttttgtacctttgtggatttgattacaagtggggtcgcaattgtggatagcctgaagatatgagaaatgtctattgtgggaaggtaatgaaggagagttggtgaccagcaggacgagagctttagccatggggctaataagacagagccaagtcagcagggacataagatgtaagagggctctggtgctcaggtagaactggataaaggatgggtgagctggagttaaacgttccatgtcataacaccaggaaagcaataaaaatgtttttattgtggcaaaatatacataatataaaaagtcaccattttaaccatttttaaagcataacatttagaggcacttagtgaattcacagtgtttttttgtttttgtttttgtttttgttttttgagacagagtctcgcattgtcgcccgggctggggtctggagtgcagtggcacgatcttggctcgctgcaacctccacctccacctcctggattcaagccattctcatgcctcagcctcctgagtagctgggattgcaggtgcccaccaccacacccagctaatttttgtattttagtagagatggggtttc[144 bp omitted]atttaatcaccactcccctaaaaaaagaaataaaaataaaagccactgataaggtttggctctgtgtccctacctaaatcgcatctcaaattgtaatccccataatccccatgtgttgaaggagggacttgatgggaggtgattggatcataggggcagtttcccccatgctgtttttgtgatagtgagtgagttctcaccagatctgatggttttataagtgtttgacagttcctccttcacactctctctctcgcctgctgtcatgtaagatgtgcttgcttccccttccgtcatgattgtaagtttcctgaggcctccctagccatgcggaactgagtcaattaaacatccttcctttataaattacacagtctcgggcagttctttatagcagtgtgaaaacgaactaatatacctacatatcttctaagttgctttccattccttacttcctccagccatggcagctactaatctgctttctgtctctatggatttacctgttctagatactttcatacgagatgagcccttttatgtctgactcctttcacttagcataatgttttgaatattcatccatgctgtagcatacatcaatactttatttctttttctagctgaatactattccattgtatgaatgtaccacattttgttgatccatcagtagatagaagtgcgttgtttctaccttttcgctattgtgaatattgctgccataaactttgtggacaagtttttgtttaaacactcattttcaattcttttaggtatatactcaatatatacaagtgggccaggcatggtggctcacacctgtaatctcagccctttggaaggccaatgtgggcagatcacttgaggccaggatttcgagaccagcctggccaacatggtgaaactctgctctactaaaagtacaaaaattagctgggtgtggtggcgtgcacctgtaatcccagctacttgggaggctgaggcatgaaaatcacttaaattcaagaaggggaggttgcagtaagccaagattgcactccagcctgggcaacagtgcaagattctgtcttaaagaaaaaaaagtctttaaaaaataatatatagcatatttatatatatatacacacatacacacaaagcatacatatatatatatatatatatatatatggaattcctgagtcatacagtaattttatgtttaatttattgagtaaccaccaaacttttttccacagcagctacaccatttacatttccataaacaatgtatgatagttccaatttcgctacattctcactagcacttattttcctttaaaaaaaaaattattggccagacacagtggctcacgcctgtaatcccaacactttgggaggctgaggtgggcagatcatgaggtcaggagtttgagaccagtgtgaccaacatggtgaaaccccgtctctactaaaaatacaaaaatcaggtggacgtggtgctgcacgcctgtaatcccagctgctcagcaggctggggcaggagaaatgcttgaacccaggaggcggaggttgcagtgagccaacatctggccattgcactccagcctgggcgacagagcaaggctctgtctcaaaaaaaaaaaaaaagatttgtccttgaatgttcatagtagttttattcacactgccaaaaactggacactacccattctctatcaactggtaaacagataaacaaattggaagatgtccaaaaaatgcaatattactcagaaaacaaagaataatttactgatatatgcaacaacatgaatgaatctcaaaagcactgttaaatacaagaagctttacataaaagactacatactgtatgattctatttatatgaaattctagaaaaagtacaactattgtggacaggaagcagaacagtggccctcaggggctggggcaggggatgg[131 bp omitted]gagaaaccccatctctactaaaaatacaaaattagctgggcatggttgtgcacacctgtaatcccagctacttggcaggctgaggcaggagaatcgcttgaacccgggaggtggaggttgcattgagccgagattgtgccactgcactccagcctgggcaacatgagggggtgggtgcagtggctcatgcttgtaatcccagcactttgggaacccgaggtgggcagatcacttatggtcaggcgttcaagaggagcctggccaacatggtgaaaccctgtctctactaaaaatacaaaaattagccaggtgcagtggcactgtagtctcagctactctggaggtggggagagaaggtgcagtgagatgagatcatgccattgcactccagcctgagcaacacagcgagactcttgtctcaaaaaaaaaaaaaaaaaaaaggcatgagggagctttctgagttgatggaagttctgtatatcatgattgtgttgtggttgtgaaaggaacacatcttgggcccccaaaatcactaaagtaaagagaaaagtcaagctgggaactgcttgggacaaacctgcctcccattctattcaaagtcattcctctgctcactgagataaatgcgtatctgattgcctgtttggagaggttcatcagaaactcaaaagaatgcaaccatggccaggcacggcggctcatgcctataatcccagcactttgggaggccaagccgggcagatcacctgaggtcaggagttcgagacatggccaaaccgtgtctctactaaaaatacaaaaaaattagctgggcgtggtggtgggcacctataatcccagctcaggaggctgaggcgagagaatcgcttgaacctgggaggcagacgttgcagtgagccaagatcatgccactgcactccagcctgggagacaagagtgaaactgcgtctcaaaaaaaaaaaaaaaaagccataaataaaaacaatgcaaccgtttgtctctcacctacctatgacctgtcctacctttgtggaccgaaccaatgtttattttacatatattgattgatgtctcatatcttcccaaaatgtttaaaaccaagctgtgctctgaccaccttgggcatgtgtcatcaggacctcctaaggctgtgtcacggacgcatgtcctcaaccttggcaaaataaactttcttttttttttgagatggagtctcactctgtcgcccaggctggagtgcagtggcaagatctcggctcactgcaacctctgtctctcaggttcaagtgattctcctgcctcagccttccgagtagctgggactacaggcacccaccaccatgactggctaatttatttatttttattttttatttttagtagagccggggtttcaccatgttggccaggctggtctcaaactcctgacctcgtgatccgcccacctcggcttcccaaagtgctgggattgcaggcgtgagccaccgcacccggcggcaaaataaactttctaaattaactaagacctctctcaaatttttgaggttcactggtaataattacatgattacatgtatgtcaaaactcatcaaattgtacacttaaaattgataaattttgttgcatgcaaattttccctcaataaagctgattaaacaaaacaaaaacagaagcaccaagattctagaaaaattgtgcctccagcagtagtttttgaatcttccaaaatccccaaataaaaatagagcaatcagacagcaaaaccaaaatcttgttgacagcattcaaacaaaactacgtgagataatgtgatgggctgaattgcatgcttccaaaattcgtatgtttaagctgtaacccccagtacctcacaatgtgagtgtatttggaggtgcagccttcaaagagatgattaagttaaaatgaggtagttagggtgggtcctaatcctatatgactgttgtccttattttatcttttttttttttttgagacaagagtctcactctgtcacacaggctggagtgcagtggcttgatcttggctactgtaacctccacctcctgggttcaacgattctcgtgcctcagcctcccaagtagtggggactgcaggcacgtgctatcatgcctggctaatttttgtatttttagtagagacggggtttcgccatgttgcccaggctggtctccaactcctgacttcaggtgatccacccacctcagcctcccaaactgctgggattacaggtgtgagccaccatgcccagcctggtgtccttattttaacaaaggaaatttggatatgctgaggcaccctaaggatgtgcacacgcagcgtgaatgccgtgtgaaaatccagcaagaaggcagttgtctgcaagccaaggagagagtccttaggataaaccagacctgccaacgccttgatctgtgacgaaaagcctctagagctgtgagaaaataaagttatgtttaaactacccagctgtggtaatctgttacagcagtaccagcaaactaatacaggaaatgtccccatgagcccccaaatataagcagatgagaacaatcataaacatcacaatacctgcatggtggacctgagcatctgtgaaggaggcagccaggggaagtgatggggcatctgaaatcatctgaaaacagaagagcctcaaaacgagtattaacacacagagggggttgggtgcggtagctcatgcctgtaatcccagcactttgggaggccaaggcaggcggatcacgaggtcaggagttcaagaccagcctggccaacgtggcgaaaccccgttgctactaaaaatacaaaattagctgggcatggtggcaggcacctgtaatcccagctactcaggaggctgaggcaggagaatcgcttgaacccgagaggcggaggttgcagtgagccaagattgtgcctctgcactccaacctgggtgacagagcaagattccatctcgaaaaacaaaacaaaacaaacaaaaaaacacagagggccatgctgacagcagcagcagagaggggttgaggcttttcctacaccaacaggaggggagtgcaagtggtccacaagggaagacctgaaggggccagtgaactcttcgctgtgacagctcttaaaactgacagccaaaattcctttccatctctaaataaatagataaataataagcaacaccagccaggcatggtggctcatgcccgtaatcccaacattttgggaggctgaggcgggtggatcacttgaggtcaggagttcaagaccagcctggccaacatggtgacaccctgtttctactacaaacacacaaaaaattagatgggcatgttggcgcactaaatcccagctacatggaaggctgaggcaggaggatcatttgagccttggaggtggaggttgcaatgagctgagatcccaccactgcactctagcctgggtgacagagtgagactctgtcttaaaaaataaaattaaatgtaattccagcactttaggagacagaggtgggccgatcacgaggtctggagtttgagaccaccctggccaacatggtgaaaccccgtctctactaaaaatacaaaaaggcatggtggtatatgcctttagtcccagctacttgggaagctcaggcagaagaatggcttgaacctgggaggcggaggttgcagtgagccgagatcgtgccattgaactccagcctgggcgacaaagcaagactccatctcaataaataaataaataaataaataaataaataaataaaatttttaaaaaaacaacagaaaagtatcaagcatgaagtccctaagagttgcaatttaaaagagagagagaataaggaacacaataacattcctcccgacaataaaagcgtatcagaaagccatgcccacaggagatcagaattggaacttgctatttcagactgagctaaaatttcattaacaaaatgatacaagatatgaaagaacaaaatcagttagaatcagaaaatgcgggaaatgaggtaataattcagaaaataattcaaataaaaatcatttcagaaatgaaaactaaactaaaaggaccaccacaaagaataaacacaacaaatgtttatgagaaactgaaggtaaaaatgaggaaaatttcttttgtttggagcaaactcgttaactgaaaaatgaggataatttcttttttttttttttgagatggagttttgctctttcgcccaggctggagtgcagtggcagatctcggctcactgcaacctctgctttctggtttcaagcgattcttctgcttcagcctcctgagtactgggattacaggcgcccaccaccacgcccagcttatttttgtatttttagtagagacggggtttcaccatgttggccaggctggtcttgaactcctgacctcgtgatccacctgcctcggcctcccaaagtgctgggattacaggtgtgagccactgcgcccggccaaaatgaggataatttctaaaattggatggaaatgaagaaagtgacaaaacaaaaaaaaaagacctgagagaaagagacaaacatagaagacagttcaagaagatcaaatacataaatagaaggttctaaagaaccaagccaaagcaaaagaaaagaacaaatactaaaatgttataattataataaaacattttctgaaataaaaaagatgtgtatcactagtgagaggtataagtgacttaaaaagcaacaaaaatcaggttgtcatttaccttctgacagttgtaaatagtaagtagaaaatagagtaacaggccgggtgcggtggctcactttggaggctgaggtgggcggatcacttgaggtcaggagttcaagaccagcctggccaacatggtgaaaccccatctctaaaaaaaaaaattcaaaaaaattagcctggcttgatggcgagcacctgtaatcccagctacttgggaggctgaggcaggagaatcgcttgaacccaggagacagaggttacagtgagccgagatcatgccacagcactctagcctgggaaacagagcaagactctgtctttaaagaaaaaagaaagaaagaaaaagaaagaaaagaaaatggagtaacatattttacatactcagtgcaagaaaagatatggcaaatattttatatccagcatagcaaaatcaaatacttttatcaacatatgagtgtcagggactcttgctggttaaaagacttaaaagatatgtcaagtaataaaaaagggaaggcaaaagcatttagggatgtgcaaatggataataatattataaaggaacacaaggaagtgatcactataaaagttaggagagggatgggctcagtggctcacgcctataatcccagcactttgggaggccacggcaagtggatcacctgaggttgggagttcgagaccagcctggccaacatggcaaaatcccgtctctaatagaaatataaaaattagccaggtgtggtggcaaacgcctgtaatcccagctactcaggaggttgaggcaggagaattgcttgaacccgggaggcagaagttgcagtgagccatgattgtgccactgcactccagcgtgggcgacagagtgagactctgtctcaaaaaaataaaaaataaaaaaaagttaggagagtggaactggttacttttaaggacagggaacacagaggaacttctagattatctagcaaagttctatttcttgacctgagttctggttacacaggtgtttgtcttgtaacaattcatttggctatatttttatgttatagttttgtttttctatatctatgttttattcttacaatttaaaaagtttaaaaacccaagtcttaggaattgtcacctttcccctccctcaaaacatggaaacatggaaaggaagaggcataaaggtcagtgctgaaattatctccttaaaatacgtatggggaggccgggtgtggtggctcacgcctgtaatcccagtactttgggaggccgaggcagatggatcacatgaggtcaggagtttgagaccagcctgaccaatatggtgaaaccctgtctctactaaaactaccaaaattagccaggtgtggtggcgggtgcctgtagtcccagctactcgggaggctgaggcaggagaatcacttgtaccagggaggcggagcttgcagtgagccgagatcgcgccactgcactccagcctgggtgacagagtgagactccatctcaaaaaaaaaaaaaagaagaagaagaaaatatgtatagggacctgcaaaaatgacatagattttcaaaagaatcgaataaaactttcatatgtgaaaagtacaataatgaaaattaaatattggccaaatgcagtggctcacaactgtaatcccagtactttgggtgggaggattgcttgatccctggagtttgagaccagcctaggcaacatggcaagaccctatctctaaataaaatataataaatgaaactaaaatacaataaaataaaattagctgggcatggtggtgcatgcctgctactcaggaggctggggcggaaggtagaggctgcagtgagctatgatcacaccactacactctggcctgggtgacagagtgagacctcttctcaaaaaaaaaaaaaaaaaaagatatgtaggacagagtgagaaggtcaaacatatttttagttggagttccaattaaacatcaatattagaagaaacaatagctggctgggtgtggtgactcactcctgtaatcccagcactttgggaggccgaggcaggtggatcacaaggtcaagagttcaagaccagcctggccaacatggtgaaaccctggctctactaaaaatacaaaaattaattgggcacagtggtgcgtgcctgtaatcccagctagtcgggaggctgtggcaggagaattgcttgaacctcagaggcagaggatgcagtgagccgagattgtgccactgcactccagcctgggcgacagagcgagactccagctcaaaaacaaaaagaagaagaaacaatagccgaacaatttccaaagatcatgaaagtccctaaaccattgactcaaatcccttaacctagacccatcatggacaaactgcagaaaaaccaaagataatgagaaaatcttagagcagcaaaagtaaaaaggataaattaccttcaaagtagtcattagactgacagctgacttctcatagcagtaatgaaagtcaagaatgaaacgatagcttcaatgtactggaaaaaaaaaagcccaatgtagaatttcatcaatggacatagggaaaatgatgtcaaatggaaatattgttatgcaaggaggaatggaaagcaatataggaattatgggggcaaatgtgaatgaatattgattataaaaagcaatatatgttgactgggcacggtggctcacacctgtagtagcactttcagaggctgaagcaggaggattgcttgagcccaggagttcaagaccagcctggacaacatggcgaaaccccatctctacaaaatgtacaaaaattagctggtcatagtggcgcatgcctgagaaagagataataaaaatacaagagaacaataatccacattgaaagtaggtgaatacatgtagctagagtagcctaagtactttctattgtcgtgggaatgaataaaggtgtgaactgcgaaagctgtaacattcaaaatagggtcacttgtgtcaaaccctggcaaattaagccaggggaaggccataaagagagagctctcacacacaatctgactgataacaggcaaatatttcacaagaaatttttccagactgcagcttacttcatgagtcacacaagcccagctacctgcttatacaaaaacacttgcctatttcaaaattggctcacagacccaatccaaaactgcaaggacctaaccattactctgagattacaaatcctacctggcaactaatgacacacaccaatcagaactctccagctcttgtaaaacgctgccagcaccaatacattttatttatttgtttgtttgtttatttatttagagacagagtctggctctgtcacccaggctgcagtacagtggcgagacctctgcctcccaggctcaagcaatcctcccacctcagcctcccaagtagctaagactacaggcgtgcaccaccatgcccagctatttttttgttttttgggtttttattattattattattattttttgagatggagtcttgctctgtcacccaggctggagtgcaacacactgcaacctccgccttccgggttcaagcgattctcctgcctcagcctctcaagtagctgggactacaggcactcgccaccatgcctggctaatgtttgtatttttagtagagaggggctttcaccatattgaccaggctggtctcaaactcctgaccttgcgatccacctgcctcagcctcctaaagtgctgggattacaggcgtgagtcgccaagcccggcccaatttttgtatttttagaagagacaggattccaccaagttgcccaggctggtctcaaactcctgggctcaaagcatccacccgcctcaaccttccaaagtgctaggagattataggcatgaggcactgtgcccagccaagtaaatttgatttaaaaacaactcacataacctcctctttacccaataaactctaaacttttcatttgttctctagacataccagacaccacgcgtctatgtatgtcctgaattgcagttctacttcttgtatattattcccaaataaaaccttttacttagcgattcgtctctatgtctttttacgttgacacaacttttttattttaagttttaatttttatgggtacctagtaggtgtacacatttatggggtgcatgagatattctgatacaggtatgcaacgcataataatcaccagggtaaatggagtatctgtcacatcaagcatttgctgtttatgttataaacatcccaattatacccttttatttttaaatgcacaataaattattgtcgactgtaatcactgtgttgtgcttttgacataactgttttagactttgatggattttgttatgcatggtattttctaaggtaattcttaaagcatagaaataatatatagaatttccaagctagtaaccataaacaacgacatgattattaaagctcctgaagaaaacaaggaggaaaaatatatatatatatgtatatataattgacaagataaacaaaagaacaaagatagatttaaaaccaaatatattagtaatcacatcgaataaaagtgaatataatactttacttaaaagacaaaggtggggccgggcgcggtggctcacgcctgtaatgcaagcactttgggaggccaaggcgggtggatcacaaggtcaggaattcaagaccagcctcgccaacatggcgaaaccccatctctactaaaaatacaaaaattagctgggcatggcggcgcgtgcctgtaatcccagctacttgggaggctgaggcaggagaatcgcttgaacccaggaagcagatgttgcagtgagccgagactgcgccactgcactccaacctggcaacagagcgagactccgtctcaaaaaaaaaaaaaaaaaaaagacaaaggttgtcagactggaattttaaaagttcaagtatagtccgggcgcggtggctcacgcctgttatcccagcactttgggaggccgaggcaggcggatcatgaggttaggagatcgagaccatcctggctaacacggtgaaaccccatctctactaaaaatacaaaaaaattagccgggcatggtggcgggcgcctgtaatcccagctactcgggaggctgaggcaggagaatggcatgaaccgaacccgggaggcagagtttgcagtgagccgagatcgcgccactgcactccagcctgggccacagagcaagactccgtctcaaaaaaaaaaaaaaaaaaaaaaaaattcaggcatattgtattctcaaaagccatctttaccttaagaatgcagaaacattgaaattaaagatggaggccaggcacagcggctcatgcctgtaatcccagcactttgggaggccgaggcaggcggatcacttgaggtcaggagtttgagaccagcctggccaacatggtgaaaccccgtctctactaaaaaaaaaaaaaaaaaatacaaacattagacgggcatggtggtgtgcgcctgtaacctcagctactcaggaggctgaggcacgagaattgcctgaacgtgggaggcggaggctgcagtgagctgagattgcaccactgcgctctagcctgggtgacaaagtgagacattgtctcaaaaaaagaaagaaaaagaaaaagaaattaaagatggaaaaactaacaataaacaagcaagttcatgtaactatactacttaaaataacagaaacttttttttgttgtttgagacggagtttaactcttgtcgcccaggctggagtgcaatggcgcaatctcggctcaccacaacctccgcctcccgggttcaagcgattctcctgcctcagcctcccaagtagctgggattacaggcatgcaccaccacgaccgggtaattttgtatttttagtagagacggggtttcttcatgttggtcaggctgatctgcccgccttggcctcctaaagtgctgggattataggtgtgagccaccgcgcccggcccaataacagaaactttaagacaaaatgcattgtgagacatatcttgcttcaaaatcctataatgatcttgtctgaggtagttaccttgcaagggtgttactgtttttcttgctccccttgtaatatccagaccataaaatgtaataaaaacctcagcattctctcaatgaccaattataaaatcaaacccacatatcaaaaatattgccagattttgaaactttatctaaaaataatatggagaatagatgaaagagcaccttcaccagagacacaacagtggttacaaaaaaatggaaagtgagaacataatgcagctatttggtgctccttgtgaccatgggcaacagatgaaaggttggggtgggagaggtaagggagagtaggttggtgtttgctgggctgattgatcctggctctcaagggggaaataggtttgaaccttctaaatgtaacatggatagaatgcaaagattcccctgggtcaactcctacctctgtcttttacaatagaaaaagttaatagaaaactatagtaactaataataattcggatcctatgaaagaagattcgagtcactttaaaaacttccaatcacagctgggtgtggtggctggctcatgcctgtggtcccagcttttgggaggccaaggcaagaagatcacaagcccaggagttcaagacgagcctgggaaacatagtgacacactggtgctaaaaaaaattaactggacattgcagcacatgcctgtagtcccagtcacttggcagagactgaggtaggaagatggcttgagcccaggacatcaagactgcagtgacccatgatcgtgcccctgcactccagcctgggcaacagagctacaaccctgtctgaaaaacgaaagaaagagagagagaagaaagaaagaaagaaagagagagagagagagagagaaagaatgaaagaaagaaagaaagaaagaaagagagagagagagaaagaaagaaagaaagaaagaaagaaagaaagaaagaaagaaagaaagaaagagagagaaagaaagaaagaaaagggggggagggacagagggagggaagaaaagaaaggcgggccaggcaaggtggctcatgcctgtaatcccagcgctttgaaaggctgaggcaggcagatcaagaggtcagcagtttgagaccagcctggcctacatggtgaaaccccatctctactaaaaatacaattagccaggcgtggtggcgggtccctgtaatcccagctactagggaggctgaggcaggagaattgcttgaacccgggaggcagaggttgcatcgagccgagattgagccatcacattccagcctgggcaacagagcaagactccgtctcaaaacaacaacaacaaaccctcccaatttgctaagtaaaagggaatgagtcacaactatgatttatagaaaaaaagactggagcatctatctgattaacatacagttatatattattactgattacttcttttttactcccctttttcctttatgtagcttttcacatgcttatatgtatggggtacatgagatgttttgataaaggcatacaatgtggaataatcacgtcaggggaaatgggatatccatcacctcaagtatttatcacttatttgtgttacaaacatttcagttctactctgttatttttaaatatacaataaattattgttgactgtagttaccctggtgtgctgtcaaatactatatcttattcatactatctaactatatttttgtccccactaactatccctactatccccttcccctgcccactatctttcccagcctctggtgaccatcattctactctctatctccatgagttcaatttttaatttttagctcccacaaatgagtgagaacacgtgaagtttgtcattctgtgcctggcttatttcacttaacataatgccctctagttccatgcatgttgttgcaaatagcagtatctcattctttttatggctgaatagtactccattgtgtatgtataccacattgtctttatccattcattgattgatggacatttaggttgcttccaaatcttggctattatcaacagtgctgcaataaacatgggagtgcagatatctcttcaatatatgaatttcctttcttttgggtatatatctagtggcaggattgctggatcatatggtagctctattttttttttttttttttttttttttgagacggagtcttgctcagtcatccaggctggagtgcagttgtgcgatctcccctcactcaagctccgcctcccgggttcacgccattctcctgcctagcctcctgagtagctgggtctataggcacctgtcaccatgcccggctaattttttttttgtatttttagtagagacagggtttcaccatgttagccaggatggtctcgatctcctgacctcgtgatccacccgcctcagcctcccaaagtggtagctctgtttttattttcttgaggaaactccatacttttctccatagtagctgtactactttacattcccaccaacagcatatgagggttctcttttctccacatcctcaccagcacttgttattgcatgtcctttggataaaagccattttatttttattttattattattattatttttgggacagagtttcactcttgttgcctgggctggagtgcaatggtgcgatttcggctcactgcaacctccacctcctgggttcaagcaattctactgcctcagcctcccgagtagctgggattacaggcacccgccaccacacccggctaattttgtatttttagtagagattggggtttctccatgttggtcaggctggtctcgaactcctgacctcaggtgatccacctgcctcggcctcccaaagtgctgggattacaggcataagccactgggcccagcttcctaaaacccctttttaactggggtgagatgatatctcattgtagttttgatttgcatttctctgaggatcagtgatgttgagcaccttttcacatatctgttggccatttgtatgtcttcttttgagaaatgtctattcagatcttttgcccatttaaaaaatcagattagattttcttcctgttgtttgagctccttgtatattattaatcccttgtcagatggatagtttgcaaatttttttcccatgctgtgggttgtcccttcactttgttgattgtttcctttgctgtgctccagaagctttttaacttgatgtgatcccatttatccatttctgctttcattacctgggatgttggggtatttattactcaagaaatctttgtccagaccaatatcctggtctttaatcttttttttttttcttccctggctggaatgcaatggcgcgatcttggctcactgcaacttccgcctcccaggttcaagtgattctcctgcctcagcctccaagttgctgggattacaggctcgcaccgccatgcctggctaatgtttttcatattttattttttgagacggagtcttgctctgtcgccaggctggagtgcagtggtgtgatctcggcttactgcaacctccacctcctgggttcaagtgattctcctgccttagcctccaaagtagctgggactacaggcgcgtgccaccatgcccagctaatttttgtatttttagtagagatggggtttcaccat[137 bp omitted]cccaagctggagtgcagtggcatgatcttggctcactgcagcctctgtcttccaagttcaagcgatcctcccgcctcagcttccagagtttctgggattacaggcacatgccaccacacccagctaatttttgtattttagtagagacggggtttctccatgttggccaggctggtctcaaactccagacttcagctgatccacctgcctctgcctcccaaagtgctgggattataggcatgagccacaatgcctggcctcattttgatttgatttttgtatatggtgagatgtaggggtttagtttcagtctgcatgtggatattgttctcccagcaccatctactgaagagactatcgtttccccaatgtatgttcttggcacctttgttgaaaatgagttcactgtagatgtacggatgtatttccaggttctctattctgttccatcggttgatgtgtctgtttttatgccagtaccatgcagttttggttactatagctcagcagtataatttgaagtcaggtaatgtgatttctccagttttgttctttttgcttaggatggctttggatattctgggtcttttgtggctattttagggctattttttctatttctgtgaataatgtcattggtatttttatagggattgcattgaacctgtggtttatttctgtagtttacacttaaaagtaagatgacagaatgtctacacagaatcctcacagatataaagtatagatattgcccatcacattttcagttgaatgaaaatgggatggaaataggaatagaaaatctattttctataaagtaggaatagaaaatcatagcctgtactagagaccatggagaaattaagggtccaatgaagggaggtaatatacacagttttaacacatttcaccaaggcaataagtcatttctcttataacacacaaacaagagtagggctaaaaataggaagaagaaaacaaaatctcaaaaactggctgttctgtaaaaaatgagtaaaatatggttaaaaaaaaaaagtgctgcccaatacccactctcaccaggtctgtggtctgcatatgcaataagaaaataagatggcccaggcgcagtggctcatgcctataatcccagcactttgggaggccaaggcgggcggatcacaagttcaagagatcgagaccatcctggccaacatggtgaaaccctgtctctactaaaaatacaaaaattagctgggcgtggtggtgtgcacctgtagtcccagctactcaggaggctgaggcaggagaatcacttgaacccaggaggcagaggttgcagtgagccaagatcgcgccacggcactccggcctggcgacagagggagactccgtctcaaataaaataaaataaaatagatataaaaaatattgtgagataggtatgtcacctttatctgcagattatataactatagagcccaaaagaatctatcaccttataagcagaactctaataaattttcaggtattactagcatattttaagtattgtgagacatcacagtagatggtgttattattagatattagagagtcaagaggatgaagagttataaaagaaacctcaagatgtgttaatgaattccattcagtgtcaattgtttattcatgtaggatactctgcatttaaactgaatgaaattcaaaatataatcctaatggggttttcattggaaaataaatgagtcaaaaattctcatgaagaaacatctttatttccaaataataaactatatattaataatatatacatacatctttatttccaagtaataaaagctattgaaaagtgtcaaggattgctagaatatggagaacagaaatagatgtgagcatttaatatacaactgatagtattttaattcagtaggagaaaggtgaataatagttacttctggcataactggttttattcctggatagaaacaagtctgacatcctgcattagatcgtataatcaattcctgatgtattaaaatattaaatctctgtgtatacacactcacagaatcacatatatgaaaaactgcactccactcctttattctcttgccctctgaaatcttccagaagcaaaaccttcctaggaaacatagaaaacactggaaatgacgccgggtgcggtggctcatgcctataatgccagcactttgggaggccgaggagggtggatcacctgaggtcaggagttcgagaccagcctgaccaacatggaaaaatgccgtctctactaaaaatacaaaattttccaggcgtagtggcatatacctgtaaccccagctacttgggaggctgaggcaggagaatctcttgaacccgggaggcggagattgcagtaagccaagattgcgccattgcactccagcctgggaaacaagagtgaaactctgtctcaaaacaaaacaaagcaaaaacactggaaatgacttgggaagcttattttatagaaataaaacagacaagaatacaaagtgtttgttgcagcattacttttagatggcaaaaaagcgcaaacaatccataatatcacaattgggaaagtggttgaaaaggcattggtaaataacactgtggaacatactgtaaccatcagaaagactgttagatcatcatctattgaaggaaaatccaaaatgtacagttgaatgtaaaaaagcaaatttcagggaaatgtatagttatccatttttctgtaaaaacataataaaataattgtgtgttaatgttttagcatgaagaaatatatgggtaatatacacaacctttaaatattattcagaagaaaattgacagaggggagggaatgaggaacggagaagggcaaagataatcattttttctttcttttttttttttttttttgagacagattttttgagactctgtcatgcaggctggagtgcagtcaggatctcagctcactgcaacctccgcctcccgggttcaagcgattctcctgcctcagccttccgagcagctgggactacaggcacatgccaccacgcccagctaatttttgtatttttagtagagatggggtttcactatattggccaggctgccccctgccttggcctcccaaagcactgggattacaggcgtaagccactgtgcccagccccttttctttctctttaatggtattgtttcattaatttgggtgcaaatgcactatctctataattttagatgaagaactttataaaagacataagcacacaagaaaagaaagtaaacaaaatctcatttggcagttttcattttgataacgcaaaacattacaacagtccatttttagtaattctctcatttgcaggtatttttgctcactctacttttctcaaatttattatgaaatattttacttccttatgccagtaaagtaaagtaacacaatgttcagagagacccgtctacacaggatctaagaaaaaaggaagtggggcataaaataacagttctacagacataaacttcatccttccacatatgcgatctgtccagcgtggggagctgcttgctgagcatgttttgagcacagggaaggcccatttcaaaacactaacttaaccccaaacaaagctacactgtggactttttttttttttttttaatagtctcattctgtcgctcaggctgaagtgccatggcgtgatcttggctcactgcaacctccacctcctgcattcaagtgattctcctgcctcagcctccccagtagctgggattacaggcatgtgccaccatgcctggctaagttttgtatttttgagtaaaaatggggtttca[140 bp omitted]ttttccttagaaagaaactggatttggtgcttcattagtaatagttaactgatcacatgctaatttttccctgttctctgtgtttatgagagtctttgaagagtcctaattttcttggagtcaatattgatgtatattttccttaaaaaccattttgtttaaattttcaaacatattagaaaaaagcataatattcaacagaaccttttaaatctgtaactatgtttctatctctgtccattttttaaatatgatgctgtttctcttttcatactttttttcctcattagtgcaccaatattttgcttatgttctcttttcttttttactgggtatataatgcgacaaaaagagtattagtcggaataaagtccttcacacacattattcacagtactttcccccccaacacctaggattatttcatgttcaatagtaagtacatgatgatgggaaattttcttaacttgttaccttcaaagggtctttcttcagtcaaacaccctgcctaatggtgactaagttctgcagaagttaaaaagcctttctacaaataataatactgatgatgatgaatataataacgatgactaacattcagtgagtatgtatttatcatgtcaggcacaattctaagcactttatcgatcttaattcatttaatcctcacaaagcattatgaggtaggtattataattatcccccattttataatttttactgagacacgcatgtatatatgaacagaaaaatgatcagcaataaataatgaactgataaagactatcctttgggatatggtcaaagggtacatttgcctttttgtaatgtttgcatcttttataaggaaaatatattcacacattacttctgcaattaaaagatatgatacaaagatgtgcttagggagaatgtccagcagggacttgtattttggcatgtattatggcaaaatatctagaggagactacgatatccaccaataggatttcataagtgatattacagtaacacaacaaaacaccatgaagataatgaagaatctctattgagtaaaatgtcgttcatgaacatttttacaataagaaagccttaatgttataaagaacaaaaagaataagccatcttcaaaaataaagaggtcacttctcccaggtactaaaggtatttttaaaatagtatacaaatcaggatgtaaacagatgaaatttatagccatataaatttaatatggattaaaatactaagaatgtaacaattagagaaattaggggaaaaaatgacaatcacaggactacatttctacaaaaattctctgacgttaagaaggttagaaaggtgttaaaagtgctgtcattttcagtatgacagactgaattatctatcatattgctagactgaattatctgatgtcaagagaagtaagcgtttagttaagggcttccaaagtatattctattcatagagtatttctccaacattatttttcccaggctgaataagctgtagtccacaaataaaatgtttctacattattctatctagaggaattattaacaagataaattctgttttgagccataattaaaagcctccctacacatttcatatattctgtttcatcaccagtacaaattttgatgctgaataagttgtgggtcataattaaagttctttccacattccctatattcatagggtttctcactagtatgaattctatgatgactaataagctgtgaactctgagaataagccttcccacatatcttacattcatagggtttctccccagtatgaattctctgatgtctagtaaggtctgagccagaacgaaaagccttttcacattccttacattcgtaaggtttctcacctgtatggattctttgatgtttaataagttgtgagctctgactaaaggcattgccacattccttacattcatagggtttttccccagtatgaattctctgatgttgagtaaagtttgagccactactaaaggccttcccgcattctttgcattcataaggcttctcacctgtgtgaattctctgatgtcgagtgaagtttgaaccactactaaaggctttcccacattccttacattcatagggtttctcaccagtgtgaattctgtgatgtcgagtaaggtctgagccacaaataaaggtttttccacattccttacattcaaagggtttcttgccagtatgaattttctgatgatgagtgagtcttgagggatgtctaaaggactttccacattccttacattcataaggcttctcaatggtatgaattatctcatgtgtagcaaactgtgagccatgtctaaaggttttcctatattctttagatgcacagaatttctttttactgttaatgatttgctgtaatgtgaaggatggatggtgactcaaagtgggcagatcttcatgagtgaataccaattgattgaaatgtcccccctgagagccgagttctttcttaaactgccgattacattcccaatcatctctgaaactggagcactgaaaatcacgtcttgtgagtttttccattatttcccactgggttgattctatttcataaatttctttcttcagaaataatttcttggtctcacatcttgattccaggactgaaagaaaatatgaaagtaatcactcacatttttcttgtttgggagaaacaaaacttcaatcaatatgggagaatttaaccgaattttttttacaaatggatgaggaaaaaagagagttagaagacaggttacataataagatgagggtagtgattaggaaaacaaagtaagtcactggttcccaaacattgctatagatcagaattactttgggaagcctgctaaatatacacatgctttagtcctatctcccttgttaaaggatgactctaatcatacacacacaaaatatctcattgcatatatacacacagacatataatagcatctcatagtatgaattataaaataagggaaatggccaggcatggtggctcacatctgtaatcccagcaccttgggcgggtgaggcaggcagatcacttggtcaggagtttgagatcagcctggctaacatggtgaaacctgtctctactaaaaatataaaaatctagtggggcatggtggtgtgtgcctgtaatcccagctactggggaggccgaggcacgagaattgcttgaacccgggaggcagaggttgcagtgagccgagattgccactgcactccagcctgggcaacagagtgagtcactgtctcaatagatagataaataaataaataaataaataaaggaatgatcacactgttaacagggctattgtcggatgaaatgaatatgcctaatggaaaattcccagagatcagtaaactatggcctatggccctgcacccatttttataaatgaagttttattagccatacttgttacgtattgtctatggatgcttttgcgctaaaagggcagaagtgagtagttatgatagagaatgtgtgaactgcaaacctaaaatacttactatttgcctttcaagaaaaagtttgccagcccctggttagatatgcatcgtctaatacagtagccgctagctacatgtggcttttaaaatttcaaataatttaagtaaaatgtgcatttcattttgaaataaacagctgaatttgaaaattcagtttctcagtcacattattcacatttccaatgttcaacagccaaatgtggctggtagcttttgtactggaagtctgtacgaaatatcacaaatataaaacatttccatcaccactgaatgttctcttggatagccctggtctggattctgtaacaggagggccagagcactttaaaaaatgataaggaactagagggtgacaatccagaaaaaagcctagcttaagaaaagtcaagtgtggaatgaacatagtatgagtggtagataggactcatttgtggacagatatggtatatgtttggggtttgatgaaaatagtgtttgtcgtgtaattctgagatgctgacctttgttaaagagaagaggggacttaacaagtacatgatcactatagtagtaatgactgactggcagaaaagacatttgtaggttcaagagaaggggagagagtaaaatggaaggcagtgtatggtactgacagatcagagatactagattcagttacatgcgttttatactcaaacttgaataattataagctttgttttcttgggcaaattagttcaaccttccaaacctgcagttctctgtctaatacaataggaatgatagcccttacaactgttgtgaggattgggattaatgtttgtaaatactatggaagaatttctgccaggcacagtggctcacgcctgtaatcccagcactctgcggggccgaggcgggccgatcacgaggtcaggagtttgagaccagcctgaccaacatggtgaaaccctatctctactaaaaatacaaaaattagccgggtgtggtagcacatgcactgtaatcccagctactcaggaggctgaggcagaagaattgcttgaacccaggaggtggagattgcagtgagccaagatcacaccactgcactccagcctagggaacagagcgagactccatctcaaaaaaaacaaacaaacaacaaaaaaaagaatttccatacaaaaatggggacattaggcccgaccccttgactcgttaaaaaaaaaaaagggagaatagttagaagacttgaaagtcactgactcttagacaaggaaatggaggggtaaggaaggtacagctttgtaaactattataatatacatgtaatacaaataaatttttacaagaaataatttggtctggttacagagggacaggatctcatctagtattcttatcagttacccatagagaaagaaatgactacggaatgagatatgatgaaaagaaaaaatgagtatagcaaggtggttgagaaaactgaaggctttagggttgtaaaagaggtctgaattccagactttttaactagctgagaggcataaccaaattatgaaacctcaatgaatattgtttttatcatctgtaaatctgtcaagtgtatgacactagtaggtactcaatattttagtggaatagtgttatgaattaagtagggaagatagtttgaaatcatactagatcatatggtaaaaacgtacatcatgcaatctttctctgatagctataaggcatttaatctgatcactgaatcctaaacaaacaaaagacgtgagaggaaatcaacactagatttaacttgtaagaaacatcaaaaagagttcttcaagtagaaagaaaaggacactaacaatataaaaatataaaactcactgtaaaggcaggaatatagttatattgagaacactctgataatgtaataatagtgtataaatcacttttaactctagtataaaagttagaagacaaggctgggcacggtggctcacacctgtaatcctagcactttgggaggccaaagcgggcagatcactaggtcaggagttcgagaccagcctgcccaatatggtgaaaccctgtctctactaaaaatataaaaattagctgggtatggtggcgtgtgcctgtaatcccagctactcagcagggtgaggcaggagaactgcttgaacccgggaggtggaggttgcagtgagctgaaatcttgccactgtactccagcctgggcaacagagcaagactctgtctcaaaaaaaaaacaaaaaaacaaaaaaacaaacaaaaaaaaagttaaaagacaaaggtactaaaaataaataaactggcggggcgctggtggctcacatgtgtaatctcaggactttgggaggccgaggtgtgcagatcacgaggtcaagagattgagaccatcctggccaacattgtgaaaccctgtctctactaaaaatacaaaagttagctggctgtggtggtgtacgcctgtactcccggctactcaggaggctgaggcaggagaatcacttgaacccaggaggcagaggttgcagtgagccgagatcgcgccactgcactccagcctgggtgacagtgtgagactctatctcaaataaataaataaataaataaataaataaataaattaattaattaaaataaaataaaaataaaaataaataaacctacaatcatttgctaatagatacacaatatataaaagatgtacattgtaacatcaataatgtaatgtgggtggagaagttaaagtgtagactttttgtatgtggtcaaagttaagctattattattattattactattattattatatttttgagaaacagggtcttgctctgtagcccaggccacagtcctcactgtagcctcaacctcctgggctcaagggatcctcctacctcaacctcctgagtagctgaaactagacatgtgccaccacacctggttaatctttttttgagacagattcttgctctgtctcccaggctggagtgcggtggcacaatctcggtttgctgcaacctctgcctcccaggttcaagtgattctcctgcctcagcctcccaagtagctgggattacaggcacctgccaccacacctggctaattttttgtatttttagtagagacaaagtttcatcatgttggccagactggtttccaactcctgacctcaagtgatccttaaacatttcggtagagacagggtctcactatgttgctcaggctggtctcaaactcctgggctcaagctatcctcccacctcagcctcccaaagtgctgggaatacaggtgtgagccaccatacccagcctaaagttaagttattattaacttacaatagactgttataactatgagatgttttaaatatgtaagccttatggtaaccacagagaaaaactctctagtagatacactgaagacaaagagaaagacatcaaatcataccaccataaaaaaatcaaatcaaaaagaaagagtgagataggaacaaagacactataaaacagtcaggattagctcggcagaggggtgcatgactatagccccagtaacttgagaggctgaggcaggaagattgcctgagcccaggagttcaaaactgcagtgagttatggtcatgccactatactctagcctgggcaatagagggagacctcatctttaaaacaacaacaacaacacaaaagaagaatcataagagactactatgaataattatatgccaacaaattggataaactaggaaaaaaatggataaattcctagaaacaaaactaccaaacctgaatcatgaagaaagagaaaatctgaacagaccaattatgagtaggatagttccatcagtaatcaaaaacctcccaacaaataaaagacaaagacttgatggcttcactagtaaattctatcaaacacttaaagaagaattaactccagttctcctcaaactcttccaaaatgttgaagacggaacacttccaaactcattttatgaggatagtattaccctgataccaaaaccagacaaaaaatctacaagaaaattacaggccaatatccctgatgaacacagatacaaaaatcctcaacaaaatactagcaaatggaattcaacagcacattaaaaggatcatgcaacatgatcaagtgagatttattcctaggatgcagggatgtttcaatataagcaaagcaatcaatgtgatacaccacatcctaaaaccatatgatcatttcagtagatataggaaagtcatcttacaaaattcaacatactttcataatcaaaactctctcaacaaattaggtgtacaaggaatttacttcaaaataataaaggccatatatgacaaacctatagctaacattatcctcaacattggaaagataaaggtttttcccctaagatcagaaacaagacaaggatgtccactcttgacactctgctcaacatagtaccaaaagtccttttcattccttttaggcaataaaaaggaataaaaggcatccaaattcaaaaaaaccctaggggatctaccataaaactgttagaagtaataaatgttatttatttgcaactcagtgtgctcccacctgtaattcccgcactttgggaggccgaggcgggcagattacttgaggtcaggagtttgagaccagccgggccaacatggcaacatcccgtctctactaaaaatacaaaaattagccgggcaatggtgggcacctgtaatcccagttactcaggaggctgaggcacgagaatcgcttgaacccaggagatggaggttgcagcgagccaagatcatgccactgcactccagcctgggtgacagagcgagactctgtctcaaaaaaaaagaagtaataaggcctcatgcagtggcttatgcctgtaatcccagcactttgggaggccaaggtgggcggatcatgatgtcaggagatcgagaccatcctggctaacacggtgaaacctctctctactaaaaatacaaaaaattagccaggcatggtggtgggcgcctatagtcccaactactagggagactgaggcaggagaatggcgtgaacccgggaggccgagcttgcagtgagccgagattgcaccactgcactccagactgggtgacagagcgagactccatctcaaaaaagaaaaaaaaaagtaataaatgtatgtgtattcagtaagatacaaaaatcggttgtttctatacactagcaacagattatcagaaaaagaaatcaagaagacaatcccatgtataataacatcaaaaagaataaaatacttaggaaaaaatttaacaaaggaaatctgtatatggaaaactataaaacactgatgaaaaaaatgaagacacgccaggcatggtggctcacgcctgtaatcatagcactttggaaggccgaggcaggtggattgcctgagctcaggagttcaagaccagcctgggtaacacagtgaagccccatctctactaaaatacaaaaaaaaaaaaaaaaaaaaaaattagccgggcgtggcagcatgcacctgtagtcccagatactcgggaggctgaggcagaagaattgcttgaacccgggaggcgtagattgcagtgagctgagatcacaccactgcactccagcatgagcaacagagtgagactccatctaaaaaaaaaaaattgcattaaataaaaaaggggggtggggagctaggggagggataggattagaagaaatacctaatgtagatgatggggtgatgggtgcagcaaaccaccatggcatgtgtatacctatgtaacaagcctgcacaatctgcacatgtatcccagaacttaaagtataataaaaaataaatgaagacaaaaataaatgaaaagatattctgcattcataaatgggaagaattaatattgttaaaatgtccatactacccaaagcaatctacacattcagtggaatccctaacaaaattccaaaggtattttcacacaaatagcaaaaacaatcctaaaattcatatggaaccataaaagaccctgaagagtcaaggtaatcttgaacaagaagaacaaagctggaggcatcactacatccgatagatttcaaaatagattacaaagctgcagtaatcaaaacagcacggcactggcataaaaatagacacatcaaccaatggaacagaatacagaaccaagaacccatacagaacccatgcatttatggtcattggattttcaataaagatgccaagaacacacaatggggaaaagacagttcaataaatggtgatgagaaactggatagccacatgcaaaagaatgaaattgaattcctattgcatacatatacgaaagtcaactcaaaatggattaaagacttaaacatgagacacaaaactaaaaacacagaaaagaaaagcaaaaaatagaaaaatatgattacatcaaactcaaaagcttctgcacagcaaaggaaacaacagagtgaagagactatccacagagtgggataaaatattttcaaaccttgtatctggtaagatgctaatatccaaaatgtataaggaactcaactcagtaacaagaaaacaaataacccaattaaaaaatgggcatttctcaaaagaagacatagaaacagccaataggtatatgaaaaaacactcaacattactaatcatcaggaaaatggaaattgaaaccacaatgaaatatcacctcattgctggttactgtggctcaggcctgtaatcccagcactttgggaggccgaggtgggtggatcacttgaggtcaggagttcgacaccagcctgaccaacatgatgaaatcccatctctactaaaatacaaaaattatgtgggcttagtggagggcacttgtaatctcagctacttgggaggctgaagtgggagaatcgcttgaaccccggaggcggaggttgcagtgagctgagattgcaccactgcactccagcctgggcaacaagagtgagactccgtctcaaaaaaataaacaaacaaacaaaaatcccctcacacctgtcagaactgctattatcaaaaggacaaaaaataacaagtgttggaaaggatgtggcaaaaagggaatccttggacactgttggtggcataaattgaaacagccattatggaaaacagcatggaggtttctcaaaactaccctataactcagcaagcttacttctgggtatatatccaaatgaaatcaaatcagtatgggggaaaaaaaatctgcattcttatgttcattgcagcatcattcatgatagccaagatatggaatcaatggataaattgataaagaaaatgtgatgtgtgggcatatatatgtatacacacacacatacacatatacacacacataatggaatgtgtgtgtatatatacaaatacacaaacactggaatattaagacttaaaaatgaagaaaatcctgttattttcaacaacatagatgaagctggaggacatatgtgaaataagccaggcacagaaagacagatactgcagtgatctcacttatatatgaactctaaaacgttgaactcatagaagaagagagtagaatggaggtcaccaggggttgggggacggaggaaagaagatattggtcaaagggtacaaagttctagttactcagaataaaaaatttctggagatctaatatacagcattatatattaatagtatgtactgccatgtaagtacataccattaatggtaataccagtacagaacgtataccatagtaactatagtttataatactgtattgtatacttggaatttattatgggagtagatcttaatgttcttaccacatacacacatatacaaattggtaactatgtgatgtgatagatacattaattggcttgattatggtaatcatttcacaatgtatacacatatatcaaaatacctaactgtatactgtaaatacatataatttttctttttgagacaaagttttcactcttgtcgcccaggctggagtgcaatggcgcgatcttggctcactgcaacctctgcctcttaggtttaagtgcttctcttgcctcagcctcccaggtagctgggattacaggcatgcaccaccacgcctggccaatatatataatttttatttgccaaatatacctcaataaagctagggaaaaagctggaatgaattgtttaaaaaactttcagagaaggatgaaagtgatgacagaaaataataagtcatagggaagaaaaattgatgtaagaaataaaatgaatgtcaaatatgaattctggaaggaaaatatggcaatgatatagaaccctaataaaacaaatttccagggttgatgaaaactcttagtattcagatggttccctttttgctgagcaatatatatgaggaaagaggtttttgttttgttttgtgtttgcctcagcctcccaagtaactgggattacaggcatgagacaccatgcctggctaatttttgtatttttagtagagatggggtttcatca[139 bp omitted]gactggagtgcaatggcttgatctcggctcaccacaacctctgccttccaggttcaagcgattctcctgcctcagcctcctgagtagctgggattacaggcatgcgccaccacgcccggctaattttttgtatttttagtaaagacggggtttcaccatgttggccaggctggtctcgaaccccaacctcaggtgatccacccgcctcggcctcccaaagtgctgggattacagtcgtgagccaccgcgcctggccacctattactttttttttttttttttgagacagaaccttgctctgttgcccaggtgagagtacagtggcgtgatctcagctcactgcaacttccacctcctgggttcaagagatcctcctgcctctcagcctcccaagtagctgagatcatacgcagctattttttttgtatttttagtaaagacgaggtttcaacacgttggccaggctgatctcgaactcctgacctcaagtgatctgcccaccttgacctcccaaagtgctgggattacaggcataagccactgtgcctggctttcataggatttaaagaaagacctagggtctcatagaataatattcagaatgccttaggataccatccaaaatcactcaacatatgaagaatgaagaaaattttaacttacatggcaaaagacaacagacaccaaaataaaggtgactcatgttggaattatcagataatgactttaaagcagctattttaaaaatgcttgaataaggaatcatgcacactctgcaaaccaatataaaaatagaaagtttcagcaaaagaatagaatatataaagaagaataaacaagttttagaactgaaaagtgcagtagccgaaataaaaaccactggctaggctcaacagcagaatggaggtaataaagtcaataaacttgaagatagttcaaaagaaattagctaatatgaatagcagcgaaaaaaagatggaaaatgcaaaaagaacatagcctctgggaatgtagaacaagaaaagatttaacatttgtgtcatcagggtttcagaaggagaagagatagtataggactcaaaaaagatttgaagaaataatggctgaaaacttacaaattttgtgaaagataaaacaagcaaagccattttgagaagctcagccaccccaaataggataaacccaaagaaatccatactcagacacatcataatcaaactgctgaaaatcaaagacaaaataaatagtgaaagaactgtaaaaaaatatatattacttctgggtgaacaatgatttgaatgactggattgctcttcataaactctggaggccagaaaaaaattggaacaataatttattgtgctgaaaaaaagagttgtgaatccagaattttgtatctaccaaaaatatccttcagtaatgaaggtgagattaagaaaagtaatactgcaaatgtacattgcagctcaggctgtgccctcagagtctgtgtgagagtaggcaatagtggggacagtggttagtaaaagagcttgtaccccttctcaaaggggttaagtgcttgttaaatccaggagacagctgtcatgtgagaatgaaggtccagtgctgctttccagctctccaaggaaaactagaaatccagatttctatattaaatcccctgatagcttgaggctggtaactaattcagaacattagagaactgtaggggcagcaccaaacacaaacatgtgtaggatacaccctgagttactaggttgttacttcaatggagttttctgtttctttgaacttcagaaattataccaagatacatctaattaaaactcttggctggacgcagtggcttacgcctgtgatcccagcactttgggagtccgaggcaggtggatcacctgaggtcaagagtttgagacctggccaacacggtaaaacctcatctctactaaaaatacaaaaaaaattagttaggcttagtggcgtgcacctgtagtcccagctactcagggaggctgaggcaggagaatcccctgaacccaggaggcagaggttgcagtgagccaagatcacgccactgcactccagcctgggcgacagagcgagactctgtctcagaaaaaataaaataaaataaaataaaaaaataaaataaatcctatggagatggttcatattttgttttaacaggtattgaccatgttgggtacaggctgcaagttccaacaaggcttgtgtggactgtgattccagtgtcagttttcaaggcctttgcagtgttatttggatttgtcctgtgtgtacaccacccaatccaatctgaacttacactttagttcttaaagtctttgatatgttatttagggacagatccacatatattcgggcaaaaatgagcctaagagttcataaaaactgagttttttgaactttgggtttttttttttttttggagatggagtttactcttgttgcccaggttggagtgcaatggcatgatctcggctcaccccaacctctgcctcccgggttcaagcaattctcctgcctcagcctcccgagtagctgggattagaggcatgcaccaccacgcttggctaattttgtatttttagtagagatggggtttctccatgttggtcaggctggtcttgaactcccgacttcaggtgatccacccacctcggcctcccaaagtgctgggattacagacatgagccaccatgccggggccaactttgggttttttgaacttgaacataggttgcttttttgaacttgttcctttctgggatcttcttaatactttctagttccctggagctcccctattcagttctctagtcctaacgctggggctttagttacctccctctgctatgtattttctgcaactatgcctgggtatggcaggaggaaacagagaaaaaaagtaataggggttcactccacggcaactctaacaggaaaagaaggttcctattccttgtagttttagatacctgcaggcccccactgcttccactattgctgctgctgctgtgagattgtctggaggctgggacatgcaaaaacaggggggaaaatatagacatatatttgtgtatatatacatatatgtatatatgtacatatgtatgtgcatatacacacaagcaagagattgccccaatctctcttggtgttaagaatcccatttcctcccatcctggctaacgcggtgaaaccccgcctctactaaaaatacaaaaaattagccaggcgtggtggggggtgcctgtaatccaagctactcgagaggctgaggtaggagcatcgcttgaacccaggaggcggaggttgcagtgagccgagactgtgccactgcactccagcctgggtgacacagcgagactctgtctcaaaaaaaaaaaaaaaaaaaaaaaaaaaaaaaaaatcccatttcctgtgccttctgccaaaactggaaggcttatcttgggccagacgcagtaatcccagcactttgggaggccaagatgggaggactgcttgagcccaggagttcaaaatcagcctagataacacagggagacctggtttctaccaaaattttaaaaattagctgggcacggtggcacatgtctgcggtttcagctactcgggggctgaggtaggaggattgcttgagcccaggaggtccagactgcagtgagctgtgggttcaccactacactccagctggaattatctctgtctacatcctacgcaataaacaactcaactgcatttgtagacccccaaaaatatatagaaaatacctagaaataaaatatcaaatgaactataagcccttttttgagataagtttataaaaatacactgaaataccatcaagaaggcctaaataaatggagaaaagtactgtggtcatggcaaacatgatttaacgtaataaagatatcagttactactaaagtgatctacaaattcaatgtaatttctttttttttttttttttttttttgaggcagagtctcgctctgttgcccaggctatagtacagtagtaccatcttggctcactgcaacctctgcctcctgggttcaagtgatgctcatgcctcggactcccaagtagctgggacaacaggtgtgcgccaccacacctggctaatttttgtgtttgctttttttgggtttttttttttgagacagagtctcactccatcacccaggctggagtgcagtggcacgatctcggttcactgcaacctccacctcccgggttcaagcaattcttgtgcctcagcctcccgagtagctgggattacagttgtgtgctatcacacctggctagtttttgtatttttagtagagcctgggtttcaccacgttgtccaggctggtctcgaactcctggcctcaagtgatctgcccacctcggcctcccaaagtgttgggattacaggtatgagccaccacacccggccaaattcgatgtaattatacatattaaaaactcaacattttaaataaaacataaagtaatttttaatactatatgaaagatcaaagagataagtataaccaaaatatgcctaaagaaaaggtggagagatgtgtcctatcagaaatcaagacttgttatataaacaagagtaattaaggcagggataaaaaggctcaatgtaacaagaaagacccaatgcatatatgaaatctgaatatatgacagaggagcattgttgatcaatgaagaatagacggagttttcatttgagagggaaacataattttttttttaagagacggtgtttccctctgttgcccaggctggttttgaattcctgggctcaagcaaccctcctgccttaacttcccaaagtgctgggattataggcatgagctaccacacccagccaattcgttttctatataggaaaaataactgatctccatctcatactattcataaaaatcaattaaagttgcattaataggtctttaataagaaagcggaaacataaaaattcttgggagttcgagatcagcatgggcaacatggcaaaaccctgtctctacaaaaaatatgaaaagttagccgggagtgatggcatgcgcctgcagtcctgggaggctgaggtgggaggatcacctgagcctaggaggtagaagctgcagtgagccgtgattgttccagtgcactctagcctgggtgactttttctgtcttaaaaaaaaaattttgggaatcaaagtagaaaattgggctaggaaggggtttctgaagatccaaaaagtataaagcatacaggaaaaagataaaaatgtttataagcaatatataatttaaccactaaacatacaatttgacaatattaacacaaagaattactgttcttcaaaagatatcataacgaaagtgaataaaaaagacacaaactggaaaacatatctataaaacatgcgattgatcaaaaatgagtatctagaatttatacaaggaattcctacaaatcttaggaaaaagacaaattagcctaatacaaaatggatcaaaatgacattatacagaagagacactaatgaccaataaacatatggaaaggtaatcatcttcaaaaatgaccagggaaatttaatttaaaattataaaataagagttcatactcaccaatcagattattaaaagatgaaaaaataatatcataaggaaagatggtggaacaaaagtacttccaacgtaaactaatacaacacttggaaaacagtttggcatcaccttgcaaagctgagtaagtacgtacaccaagatcctgcaatggtattcctaagtgtatttcctaacaaatctcttgcacatgtctaagtctgcagatgtaaatattattgtcataattacatgtttacatatatacattctatatattctactatgtttataaatacttttttttttgagacggagtcttgctctgtagcccaggagtgcggtggcacgatctcaactcactgtaagctccgcctcccaggttcatgtcattctcctgcctcagcctcccgagtacctgggactacaggtgcccgccaccatgcccggccaattttttttgtatttttagtagagacggggtttcatcatgttagccaggatggtctcgatctcctgaccgcgtgatccacccacctcggcctcccaaagtgctgggattacaggtgttagccaccatgcccagcttataaatactattttaagggaaaaatttaatggataggttgaaaagcataaaggtcattgttacagaatatattagcaaatcaatataaatcaaggccaaagaaatatatatattaaatatatataaaggcagtataaatatatataaaggcagtataaatggaaaaacagataaagagtaagaaacacacagacgttttatgtcagtttaatagaaggaaaaaaggaaaaggtaacaaggcaatatttgaagagatgactactaagaatttcctatcactgaaaaaaaaaagatgtaagtcctcagattgaaaaatactaccaggagcaaggcataaggggaataaaggtaaccatatctgaatttatcacagtaaaaatttagcctattagaggaaaacatttttctctaatggaaaggaacaagaatcatctatcaaaaagaaaacagttaagaatatcttcatggccttgtggcaggcaaagatatattaaaaaagacaacaatgtacagctgtccctctgtaccaggtgggaggggtgaggacagttgaggtttggtttcaggaccatggcagacacaatctgcggatgctcaagtcccttatataaaatggcacagtaagttggtttcaaccaactgtgagtctcaacctactaatacagagggccaactatacgtattttacatccatgattggttgagtctgtggatgcagaatccacaaatacgaagggctgactatacatatgtgatgattccattcatgtaagattcaaatataggctaaggaagaatttcttaactgagtccctacgagtgtgaagcataaaagaaaagatggatacatttgactacagtaatcattaagaacttctgctcacagaaaagaaaaccgtaaacagagctaaattcaattcagagtagaaaaagatacttgtagtttgtagaacatgcaaagtcccataagcagaacatataaagaactcttacacattaagaaaaatacagacaattcggccaggcgcagtggctcatgcctataatcccagcactttgccgaggcaggtggatcacaaggtcaggagatcgagaccatcctggctaacacggtgaaaccccatctctactaaaaatacaaaaaaattagccgggcgaggtggcaggtgcctgtagtcccagctatttgggaggctgaggtaggagaatggtgtgaacccgggaggtggagcttgcagtgagccgagatggcgccgctgcactccaccctgggtgacagagcgagactccgtcaaaaaaaaaaaaaaagaaagaaaaatacagacaattcaacagaaaaa[137 bp omitted]cagtgaaaccccatctctactaaaaatataaaaaattagatgggcatagtggtgggtgcccataatcccagctacacaggaggctgaggcagaagaaccacttgaacctgagaggcagaggttgaagtgagcgaagatcgcaccgctgcactccagcctgggcaacaatgtgaggctctgtctcaaaaaaaaaaaaaaaaaaagaatttcaaaaaaccaatgacttgaaaatgtgtgctaaaactcatcaggaaagaaaaatgtggccgggcacggtggctcaagactataatcccagcactttgggaggcgggtgggtcatttgaggtcagcagttgaagaccagcctggccaacatggtgaaaccccatctctacaaaaaatataaaaattagctgggcttggtggcacgtgcttgtaattccaggtacttgggaggctgaggtgggagaattgcttgaacctggaaggcagaggttgcagtgagctgagatcatgccactgcactccagcctgggtgacagagcgagactccatctcaaaaaaaaaaaaaaaaaaaaaaaaaaaaaaaaaagaaaaaaagaaggaaatgcaaattaaaaccacactgaat[137 bp omitted]cagggagaaaccccatctctactaaaaatacaaaattagccgggcgtggtggcgcatgcctgtaatcccagctacttcggaggctgaggcagaagaatcacttgaacccgggaggcagaggttgcggtgagccgagatcgtgtcattgcactccagcctgggcaacaagagtgaaactctgcctcaaaaaaaaaaaaaaaaaaaattaaagtttgacaataccgtacattaggaagcatgtgcaacaatgggaacattcatatactgctggtgaaattgtaaacaaatacaagtgttgaagaaaagttaaaattaggtagctcggctgggtgaagtggcttgctcctgtaatcccaacactttgggaggttgaggtgggaggatcacttgaggccaggagttagagatcagcctggtcaacatggcaaaaccctgtctctactaaaaatacaaaaattagctgggtgtggtgctgcatgcctgtaattctcacaattcgggaggctaaggcatgagaatcacttgaatcttggaggcagaagttgcagtgaacccagatcacgccatttcactccagcctgggcgacaggactagactctgtctcaaaaaaactaaaaaattaggcagctagtttgggagcagtagctcatgcctgtaatctcagcccttctggagcctgagtggtgggatcacttgagcccaggagttccagaccagcctgggcaacgtggcaaaaccccgtctctacaaaaaatacaaaaaattaaccaggtgtggtggcatgcatctgtagtcccatctactcaggaggctgaggtggggggatcacgtgagcccaggaagtggtcaagactgcagtgagccgtgatagtgccactgccctccagcctgggcaagagtgggaccctgtttcaaaaaaaaaagtaaaagcaccctctgggaaccaatagacaggtaaatgttattattttgcaaagtccataaaaactgaaaaaatcaacacagtaatagattaaaagtatgaaatatagaaatgaacaaggtaattatcatgctatggtgaaaatgtacactcttacaagtattcaatataatgacaataaagcagtccagtatacaaagaaatcactgtaaaatttatataactttgcattaaggttatataagggagaaagtatcagtattttttagaattacatgagattatgcaagggtgaaatgacatgaagtcctggatttacttgaaattatttgtggtgggacgcggtggcttacgcctgcaatcccagaatttgggaggccaaggcaagtggatcacctgaggtcaggagttcgagaccagcctggccaacctggtgaaaccccatctctatgaaaaatacaaaaaaatttgccaggcatggtggcgggtgcctgtaatcccacctactcgggaggctgaggcaggagaattgcttgaacccgggaggtggaggttgcagtgagccgagatcacgcctttacactccagcctgggtaacaagagcgaaactccatctcgaaaacaaagaaaaaaaagaaaatatttgtgcgacaataggggtagattagtggcatgtatttttgaaaattttcacaatgaaaagcaacattctacgacttgtaaaataaatgagcgaaaacatttatttaaaataaaaattaaccattcttaaagagtacaatgaaatgaatactaccaaacactgtgagtgtctgaaagcttcagaaatatcttgtctctgagaatctatcctaagcaaatacagaaaaatctatatgcgtaaagtgtgcttttacataaagaatgcatatatgcataaagaatggtacttttacaaacaagcattgattagaaagcagcttaactatgtaagtataagtactcgaactgcactaaaagaaaaaaaaaacagaattatatgagaaaatgcatgtagaaactattacatacctatctaatcttcatggccagatctttttggtacttttcttcctgagttcctgagttcaccttctatcctgctgttgttcaacctacatttccttgccataccttctcctgctgtaaacctctaggtatcagggtgcttcaggtttctgtccttgctatatttattccctaggggatttcatccagtcacaagactctatatctctacattgaaggctctccaaattttcctccaatgctgatctgacctcccagttccagacttctatactgagctgcctgcatggcatctatgctgcgtccagtaagccctgaagcttaacataagcaaacccacccttgattttgcaagccccaaatctactttccccatttcagtaattacaaagcccattcttccacaggctctccctaaaaagcatgaatccttttttttccgcttacactccaagactgaatcctgctaactcttccttgaaaagatttcaaacccaccgcttccttccactgccactgataacatttcaatggtctctgagccatcactgtatctcaaccagactactacaaaaacctgctaaacagccactctgcttccaatcttgccacctacaaagcagccagggaaatctttttaaaatatatgttgcatcaaggacaggcgcagtggctcacacctgttatcccagcacgttgggaggccgaggtgggaggatcacctgaggtcaggatttcgagaccagcctggccaacatggtgaaacactgtctctactaaaatacaaaaattagctgggcatggtggcgggtgcctgtaatcccagctactcgggaggatgaggcacgagaatcgcttgaacccaggaggtggagcttgcagtgagccaagatcatgccactgcactccagcctgg[137 bp omitted]tggtgaaaccctgtctctactgaaaaaaaaatacaaaaaaattagccgggcatggtggcacgcacctgtaatcccaactactcgggaggctgaggcaggagaatcgcttgaacctgggaagcggaggttgcagtgagccgagatcatgccactgcactccagcttgggcgacagagcgagactctgtctcaaaaaaaaaaaaaaaaaaataatgagttgcatcaagccatttctaggtgcacagccttctgatgacttcttgtcttagaatgaaaagatttcccatggcctgtatggcagacagtacataaactgacccactctttcccactcctgcctctttgatctcatctcccacccacgtacccctctgctctcactcctccagtcactggcctctggggctgctcctcaaacacagccaacgcacagctgcctcaggcccttgaaggtctgcattcctccatctggagtggtcctccgcccagtacagtaacttactatggtgcttcttcaggtctctgcccaaacgttaccatatcatttagtaagatatggtaaatttctcttgccccttcacataaaatatcatcctttatccccttcctctacttcttatttcttttagtatttactattacctggtatgttatatattcatctattttcatgtctctccctacactgtggggtaggttctgggaacagagattatgcatgttcttttttttctttttttgagagagtctctctctgtcactcaggctggagtgcagtggcgtaatcttggctcactgcaacctccacctcctgggtacaagtgattctcctgcctcagcctcctgagtagctgggattacaggcgcatgctaccacacccagctgatttttgtattttttagtagagatggggtttcatcatgttggccaggctggtcttgaactcctgatctcaggcaatcctcctgcttcagcctcccaaagtgctgggattacaggggtgagccactgcacccaatcacgcatgttctattcattactgtaacctcagtgttgagaatagtgctgggcataccatagtcactacagagacataaactaaatgaatgaatgtgctgttctgttcctcctccttcataccaaatctctctttgccagctcttaccttctccatggagacacaggccctttatttccaaccctctatataaagtcaatgatgcttacaccaaaaatctccccctatgacttctatgtggatcaacccctcttctacctcgttagccctcactttctgctaagctccctattttaacttcgcttatggtggtgttatttgtagacatgttctagtacttctactaggcagtaagttctgaaattgcttattccttttttaaactctgcagcacctagctgagtgccttatacatgttagaaaatcagtaaatgttggtaaaaaatatgaatgaatcaatgagggcataaacccctatcccaaaaaacttagtaaaagcaaataagtctttggcagtgtaggaaaaaatctatttctggagacagtgatgcttttattagactaaatacaaaggaggatgagaagctaggaaggaaatggatccaaaatatggatagaaaagaatatcactagaaagggtggaggagggcaccagctggttagaactgagagagaaggataagaggagaaaagcaggcaaagtgtgttaggtaaaggggaaaggtaggatcatttgaaagctcatgtagaaaaggtcttacatttgcacaacaggccaaaagcctgtgaggagagtttcccagatagcatctaaaagatgcagtctctctaccagccaaatcacgcattacctgctgtgcctcacttacctggccactggcctcttgttagctctctgtcagccaaccagggctccttcccttgctccaagtaggagatcacatttggtttagaaatagaatgccctgcttacaaaagaagtaacaaaacaaatttatcatgagcatatcctagaattcaaatccagtcccttcattataaagaaagacatggcattatgagaagagtcaaagagaggtacaacggacttatgaaacataacggaagatgtaaaacatccccaaaaactcaatgcagcttcctttttctaactctaccatattcagaacattcctgtggaacaggatatcaaaattcgactggtttttgaaagccaggtgagcatttcacattggaggaagtaggccttccaagggcagaatctaaattactatggacagatgtccttacccattgaaaccaggttgctgtaattctccaacatcacatctctgtataaatctctctgatcatcattcaggcattcccactcctcctgagagaagtctacggacacatcactgaacatcactgactcctggaacaataaccacgtatatgacttcattaattttttaaaaagtacttttgtgaaggaaagagagaagaaaaagattaaggtagaggaagtaaaatatagtgagcatatgaatgtctgggaagcagtggaggactgtaaacaaataagcacaactgaatcactgggtttccaggtcattctgtttcctccaaatgaaactgcctgagtatgctaggatacctccattatccaaacaaggttgggaaggtacaaaaattcagctaagagggcttttccaattaaatgaaattgtatatgcaatgcctcacactatacctgtcatataataaatcaacgatacatgtgatctttctccctctcttttcccaaatagctgagagtcaaatttcagaataagggataaagacattaaaagccaccagagagaagagcaggtcatataaaaggcatcaaaaattagaggggcaatggaattctcaagaacacctctaaaagcaagaaacaataagaacgattcttcaatattctgatggagaaaataaactctgacctagactttcataaacaaactatcattctgttttgagtgttgagaaaagacatttgtagacatccaaggactcaagaagagtttcttcagaaacttctagaggatgtggtccacaaaaacgagggagtaaacaaaaaaagaagacaacataggattcaggaagtaggtaaagtttcaggaaagctgtgactgagagagtaaaccagaccagatgggaacaaggaaacaggaaatggggaatcaagtctctatatcaaaaggaactgatgtgtctgaccagagggaaaacgtattgattggcctgtggcaatgatgctggagattctggatataaacacacaaatgactaggcaaatgaggggggaagcaattaaccccaggaaaatgaagggttgtatagaacaaagccatgagctcgcttggcagagaataatatttgcagccgtaataaggtgtatactattgatttaaccaaaaatggtgatatggtaacagtcaggaaaaacgaaagtgcagtatgggaatacaatgttccctttaactttgcaatcagtcaagagataatgactaaagtgggtttatcgaaaaatggtagtaaaccaattttcaagagttgagggcagtggcctcttggagtgggtctggtaacgggacaaaaccagaattgaactatttcccttgtagacatgtgtaaaattacttttaaaaactttgtatcttagaaaattaaatttgcatataatttaagactctgatccattcctatgccagactattatataataagaaatattccttgttacaacaaatgctattcatatgtttctcactgaatactattctattataaggctataaatgacatctatccttttgcctttagaaattcaggctagaggtgatctctaaagacctcgccaacattggcccaatcttatttataaccacctactgcccagctgtaaattccccttataactaagctacagaaaactggtgaaggatgatccagtttcaccgttggtattactgacatcattgcttttgttttttaaacaggatcttcctctatcacccaggccaaagtgcagtggcatgatcacatctcactgcagccatgacttcctgggctcaagtgatcctcccacctcagcctcccgagtagctgggactacaggcgtgcaccaacatgcctggctaatttttgtattttttgtagagatggggtttgccatgttgcccaggctagtcacctgggttcaagcaaaccaccagcctcaacctcccaaaatgctggaattacaggtgtgagtcaccacgtttggccactgacatcaatttttcatggatgcttagtgaggtgtgagagctttgtaacaaccactagtcacactctcaaacataaaaggctcgttaaccaggagaccttgccatgtactaggactgaaatcaaacaaaaccacagcatgtattttcttattggaaaacccaggtctacagagctaatgagggcttttccctataaggtgcccctaattacttattttcatcccatcaaatcactgtccaagcaaattaaattcatattaattcaatgtggggaacacatttctgccctatcaggatttttggtagaaatctgagataggagatgctgaaggacttgtaaaccagcatgtaaacattgtttaaaagcggggggcggcggggaactgaagaggagactggggttgtttaggaggaaatgcatgtccttttcctgacaggggaccctggaaaccagtgtaaaaaaaattattccaaacctgatctgggtcaggtttttacattacataatttttacattacataattcttaaatctctttatggaaagaaagaaataagtattcttgatgaaactgataggggattttctgatggacattaatctaaattaaaacttcttcagagaaatttgttattcaaccacttggctgactaacagttaacagtgaattaatataaatttttttctgggcacagtggctcatgcttataatcccagctctttgggaggctgaggcgggtggataacttgaggtcaggaattcgaggccagcctggacaacatggcaaaaactcatctctactaaaaatacaaaaattagctgggtgtggttgtgggcgcctgtaatcccagctactcaggaggctgaagtaggagaatcacttgaaccctggaggcagaggttgcagtaagccaagattgtgccactgtactccagcctagaagacagagcgagactccatctcgaaaaaaaaaaaaaaagggtaaattttctaacaatgattatgtaatcaattctttttttttctatgaattggcctgttagagatcctttcctttacagcaaaattctgacattgctcataaccaaactttttgaaaggtgttgtttttctaacatcaaaaagcatcatcatgaggaaagcaaatgtttacagttactagaagtaaaaatcactctatctgagcaaaaggaaacagtatctcacctgagccatggctctgatatttgtagaaaaggaccttctcttggctcttcttttggagaagggtagagctgggagaggcaaaagaagatagataagaccccactttcctcacagctcctggcccagaatgatcattttccttctgttcatgcttcagaaatgcttgtggggtatcagtgaggagaatgggcaaatgtctctatcatccctagcttcaaagataccaggctgtaactggagcaggatggattagggcaactcaatatggcttggagaatatatgtttatatacacacacatacatacatatagatttttttaactcatattatacacactacttatacacgttgctatttttactttacatatcttggaatgaagtcccaattagcacatattgtgttacataactggtttaatagctacattgcagtccattaaatggatataacttaattttttttttcttttctttttgagacagagtctcactctgtcccccaggctggagtgcagtggtgcaatcttggctcactgcaacctccgcgtcctgggttcaagcgattcttctgcctcagcctcccaagtagctgggactacaggcatgtgccaccacgcccggctaattttttgtatttttagtagtgatggggtttcactctgttagccaggatggtctcgatctcctgacctcatgatccgcccgactccacctcccaatgtgctaagattacaggtatgagccaccgcgcctggccataactttatttatttaaccaatctgtggccaatcatcatttaggctttttctagtttttcactgtaacaaacaatgctgtaataaatatccttgtgcatatgtcattttacctgtatatgagttcttcacaattaattcctaaaagtataattgctcagagattatacacattttaagtttggatatacctgggtcaaaccagttttctgtttctgttttttttttgtttgtttgtttgtttttttgagacggagtcttgctctgtcgcccaggctggagtgcaatggcgcgatcttggctcactgcaagctccgcctcccaggttcacgccattctcctgcctcagcctcctaagtagctgggactacaggctcccgccaccacgcccgcctaatttttgtatttttagtagagacgggtttcaccatgttggccaggctggtctcaaaatcctgaccttccaaagtgctgggattataagcgtgagacaccacacccagccttgtgtgtattctttataaacatcttcactttaagatgtttaaagtgcccaaaagaataagttatactaaaatactaaaggaagactacattgtttaaggggaagaactgaattagtgatcaatgtttaaatgtttaagaaaattttggtgttttgcttattagctacaagaacttaataaacttaaaattatacaaactataaagagcactattattctctatgcaccaagcttcttgatcattaaacaattcatcaattatttcatataaaactgaccacccagaaagtagcaccatgttatcaattatctaatggcttcctctacccataggcactcactcactgcatttccccagatgaataccaaaggaatacaagtgtctcttctttaaaacctaaatgcacgctgatattattattattactactacatattaagctcttagtattcttttatcaaccaaatagcctatgatatataatagccaggcattgtgctagatactaaagagtcaaaaataatccagaaagatctggaaacagagttccttcttctatattcctcattttaagccctcctttctggtctctcctcctggccttcctctggttaaagggatgtcttcaaatgctgtaccttccaagcaggatggcatgaaacattcccacttcaacagctccataccatgcttgttgcattctcaacactcctcatctttgccccagagggcagcctcccatgctgaattcttacatcaggggatctgctcctctcttttaaattcagccctcattaatgtaaaaaaaaaaaaaaaaaagtctcacgaaataagaaagaaaactttctcaacttgatgagtagcatctaagaaatacctactgttgggagagacagttaccatgggtctccacattcttaggcgtcttgctgggtatgcctagaatgcaagattctaactactcatttcccagggttatttatgcagctgataaccttgagagttgagataagagcacgaacagtagggttgcttactgctgactataaaagcaatggattatccaggctcagtgttcctcagtggctatgcccatgcactgcatgaatagcatccatgtagacccacatgctgtccccatgggagctgagagaaataggaactgatgaacactgatgcctacgctgcttgctgtgccatgagtaataaagtctttgtctctgatccaggggtctcatgttttctgccagcattcatgaaactaacaggctaatgtatgagcttgtatgtaggaaaatatcaaatcctagagctaatgttataactaatgttgaaacactgaaaaatgtccccctgaatccaggaaaaaaagaataatgtgcattatcatcatttctttttaacaatgtaataaagggcttggccagtataatagggcacgatgaagaaataaaaggtataaagattggtaggaaagaaagaaaactatcattattcacagatgataagttgcagacatagaaaatcctaaataataaattcttaaaattagcaagtgaattaaacaacatggtctcatatagagacaatatataaaaatcaattgcatttctagtaacaagtaattggaaaattgtttaaaatgtaaatactattcacagtttccataataaacatcaaatactcaggtataaagctatcaaaaatgttactaaaaatgacaaattggtaagagaaattaaggatcttaacaaatgtcgacatataccatatgtactatagattgaatattgatgtcaattctcccaaaatgaacacagtttttgtttttgtttttgaatcagggtcttgctttgttacccaggtcggagtgccgtggcacgatcaaagctcgctgtagcctcaacctgtggggctcaagggattctcccaccccagcctcctgagaagcgaggagtagaagcacgccatcaagtccagctaaatgtttggggttttgtttctttgtttgtttgcgtgtttgcttggttttagttgtttttttgtttttgtttttgttttggtagagacagggtctcactgtgttgcccaggcttgtcttaaactcttgggctcaagcaatcctccagccttggactcccaaagtgctgggattacaggtgtgagccactgcatcaggccccaaaatgaacacatatatttgtaaagaaaaccccagcaaggctttggggggaataaggtaaaaattagcaagttgattctaacatttatttggaaattagaagagcttataatagccgagatagcttggaaaagaaaaaaagtaggaggactaaaactacagatttcaagacagcagtacagacaaaacaataaaaccaaatagaatatagagtccagaaagagagccacataaccacatgtatatactgtcacctgatttatgacaaagactccatgcaatttttttttcttttttttttttttgagacagagtctcactctgtcacgcaggctggagtgcagtggcaagatcttggtttactgtaacctctgcctcccaggttcaagcaattctcctgcctcagcctctggagtagctgggattacaggtggctgccaccacacccggctaatttttgtatttttagtggagacagggtttcaccatg[137 bp omitted]acagtgctgaaacaactaggcacccaactggaaaaaaaaaaattaacctttaccccatacataagaattaatttaagagggatcacagacttaagtgtgaatgtgaatgtttaaaagcttcggggccaggcgtggtggcttatgcctgtaatcccagcactttgggaggccaaggcccaccaaggcaggcggaacacctgaggtcaggagttcgagaccagcctggccaacatgttgaaatgctgtctctactaaaaatacaaaaaaaattagccgggcatggtggcagacgcctgtaatcccagctactcaggaggctgaggcaggaaaatcgcttgaacccaggagacagaggttgcagtaagctgagatcacaccactgaactccggcctgggcaacaagagtgagacttcgtttcaaaaaaaagcactagtcataaaagacaaagtactaaataaatatctgctacaaaaatggggaaagacataaacaggcaatcttttaaaagactctgaaatgttcaaacacactcataatgagagaaataagaaaacaacaatgagggctgggcacaggggctcatacctgtaatctcagcactttgggaggccgagtctggtggatcacctgaggtcaggaatttgggaccagcctggccaacatggtggaaccccatctctaccaaaaatacaaaaattagctgggcgtggcggcacgcgcctgtagtcccagctactcaggaggctgaggcaggagaatcacttgaacccaggaggcggaggttgcagtgagccgagatcgcgccactgcactccagccccggcaacagagcaagacactgtctcgggaaaaaaaaaaaaaaaaaaaaaagaaaagaacactgaggtactatttctcatctattagactggtgaaaactaaaaaacatgacaacatattctgttaggtgggctgtgaagggaaacagacatgctcatacacagcaagtaggaataaaaactggtacaacagttctagagaggaattttgcaatacttaacaaaactacaaagcacttaccttttgacccagcaataccgcttctaggaatctaccctaaagatactcctccagcaatagaaaaatacatatatacaaggttattgcagcactgtttctagtaacaaaatattgtaaatgacctaaatatccatacgtaggaaagcggttcaataaactatgataaatccacaggctgcagtattatgtaacaattagaaaagaattatgaatatctctttaactgcctgagtgttatccagaatgtatcattaagagaaagaaacaatgtacaaaagagtgcctagagaatgctatctttaatgtaaaaagaatataggtaactcttcatttgtgcaaaagaaacacagcaaggataaagcagaaacgaatgaagttgaatatatacaaggagtctgtgggaactaagttaatttttatttatttatttatttattttgagacggagtctcgctctgtcgcccaggctggagtgcagtggcgcgatctcggctcactgcaagctccgcctcccaggttcacgccattctcctgcctcagcctctccagtagctgggactacaggcgcccgccaccac[133 bp omitted]tcccctgcgaatgttttcacattcaaaatagtgtagcctgctacaatcaaccaggatgtgggggaacccaaaatgcaacaaatgatccttaaatgtaagaaaaatgtaagaaaaaaaaaaaacatactgaaaagagtggcaaagaaaagaactaaattgagtaactttggaagatgtttgtttactatatactataagcttaaagaaaaagagctacacagagattctctactgtagttactaaatactttttacacaggtccaggttggcaactctgaactaatttgcatgtattctaggatagagctaattattgattctgagaagcaggtttctctctgttggaaaatgaagtaacaaggaaatggccaaatttgatgggagacaattctccatgggtcttgcatgtttctgcgtatcttgcaagaagaggtactaagtgtttttgttctgcactattttaccaagttgtttatacagtgaacagccttggaagacagagtcggtctccttctacagcaaagggtaggcattctaactatccattataaaaaattcaggtttcctaaggtcaagggaacacacagatacctgtgtattttgcataatcctgggtgtatgactgaatcagtaccatgagaatgtagatattctgaagattgccatgagcaacaaagcatcctttgtctcagactcagaagtctcatgttttctgaacgtatctgtgaaactgacaagccaacttactagcttacaactagggtaaaatctcagatagttcatagttcttgggaaaagaaaataccctgtggtactggaatagaattaaacatatgagtgtaaactggtgtgtttttaacatataaacaaataaatagacataaatgtgcatgtagacatttgtgtattttctcactctctccactgaccagaaccagagcaaagacacaccagtagcaataagcacaccaagtgcccagatcttggtttataaattcattctccaataaaagaaattaatgctgcttggagaaattgctgagcccagagatggaagagggaaaatacaagatgaacctggaacatcttatgtcccagaaagcggggttggggggaagctttaaaaaatgatcacacgttgaaaagacacaagagccaacttaaggagcttctgatggccaaatatgggaaaatttgaacagcaaaataaataaataataataatagagaatagaataaaataaatatccatgagtccataggtaaataattgaataaacaaatggggacaaaagaaaaacttcagctgaattaaatgtaaaggagtttcattgaacaatgaacgattcgcaaatcaggcagcccccagaatcacggcagattcagagacactccagggatgcctcgtggtcagaacaaatttatagacaaaaaaaagggaagtgacatacaaaaatcagaagtgaggtggagaaacagctcaactggttacaagttcttgtttgccttttttttttgagacggagttttgctcttgttgcctaagctagagtgcaatggcacgatctcagctcactgcaattctcctgtgtcagcctcctgagtagctgggattacaggtgcactccaccacacctggctaattttttgtatttttagtagaaatggggtttcaccatgttggtcaggctggtctccaactcctgacctcaggtgatccgcctgcctcggcttcccaatgtgctgagattacaggcgccagcctctgtgcccagacagtgtttgccttacttaacacagtttgaacactcagcagtgtatgagtggttgaagtattgctgctgggattagccaagactcagcttgttacaggcacatacactgttacaggcacacaagttaggtttccaattctgtctacctgttaggttacagttcgtccataaggactcaaatatagaagtacaaagtccttctcaggccacatttagttcacttttaacaggagcaagaagagacagctcttccttatagtagaatttaaattatcaaagtgtaagaaatgatagaaggagaaaatcaccgctaggcaaacatcacagtaataattgttacaggtaaaaattatcaatgaatgttaaaactaatgcgtgagaaaacatgatgagaaataggattttggcatagtttcttttttttttttttttttttgagatggagtctcgctctgtcacccaggctggggtgcagtggcgcgatctcagctcactgcaaactccacctcccgggttaacgccattctcctgccagagcctcccgaatagctgggactacaggtgcccaccaccatgcccagctaattttttgtatttttagtagagatggggtttcaccgtgttagccaggatggtcttgatctcctgaccttgtgatccgcccacctcggcctcccaaagtgttgggattacaggcatgagccaccgcgcccagccatttttacatagtttcaaattatttccccacaagatacttattcaataaaatgggaaaaacagtgattttacagaggagaaatctggcaaacaacactgttaccaagttctcaaagttaacattgctaataatgagatatactaatatatatatctcctgatatgacacattgagaagagttcaacatcatttctgtgatcttcttgccaaaactgcccagtctaaatctaaccataaggaaacatcaggcaaacgcaaattgaaagatattctgcaggctgggtgtggcaatcccagcattttgggaggccaaaacaggaggatggcttgaaagcaggagttcaagaccagcctgggcaatatagcaagatgctatctctacaaaaaaaaaaaaaaaaagaaaatagccaggagtggtggtgtgcacctgtagtcccagctactcaggggctgaggtggaagaattgcttgagccctggaggttgaggctgcaatgagccatggtcatgccactgcatttgcactccagcctggatgacggagcaagaccttgtctattaaaaaaaaaaaaaaaaaaaaaaagtggccggtgctgggcgcggtagctcatgcctgtaatcccactactttgggaggtcaagtcggccagatcacctgaggtcaggagttcgagaccagcctggccaacatggtgaaaccccatctctactaaaaatacaaaaatcagccgggggtggtggcaggtgcgtgtaatcccagctactcgggaggctgaggcaggagaatcgcttgaacccaggaggcagaggctgcagtaagctgagatcgcaccattgcactc[144 bp omitted]gaaaccctgtctctgctaaaaatacaaaaattagctgggcgtggtggtgcgctcctatagtcccagctgctcgggaggctgaggcaagaatatcgctggaacccaggaggtggaggttgtggtgagccaagattgtgccattacactccagcctgggtgacagagactccgtctcaaagaataagacagagagagaaagagaaaagaaaagaaaaagatattttacaaaataactggccagtactcttcaaaagtgtcaaagtcctaaaagataaaaaggattaaagaacactcaaagatggaaggagactaatgaaacaatacaattcaatgcaggaccttggattggatcctgaaacagtaagaaaatttagcaaaatttgaaaaagggctctaacttaattaaaagtcttctatcagcataaatttcctggttttcatcattgcactgtgggcacctgcagagtatctgcaaattccttatactatgttcacaacatgaaaataaaattttaggccaggcatagtggctcacacctgtaatcccagcactttgggaggacaaggcagttggatcacctgagatcaggagtttgagaccagcctgaccaatattgtgaaaccctgtgtctactaaaaatacaaaattagctggccgtggtggcgcaagcctgtaatcctggctacatgggaggctgaggcaggaggattgcttgaacctgggaggtggaggttgcagtgagctgagatcatgccattgcactccagcctgggcagcaagagcgaaactctgtctcaaaaaaaaaaaaaaaaaatgaaagaaagaaagaaaagaacatttttaaaaaatttacgaaggggaaaatggacacaaaaaagaagatatacaaatggccagtaaacatacaaaaaggtgctgaacatcatttcacatcaaggaaatacaaattaaaactatgatgaggctgggtgcagtggctcacacttataatcccaggattttgggaggctgaggcgggcgggagtttcacatggtgaaactctgtctccactaaaaatacaaaaattagctgggtgtggtggcacgcacctgtaatcccagctactcgggaggctgaggcaggagaatggcgtgaacccgggaggcggagcttgcagtgagccgagattgcgccactgcactcccgcctgggccacagagcgagactccgtctcaaaaaaaaaaaaaaaaacaaaccaaaacaagacaaaacaaaccaaaacaaaaacctatgatgaaactgcaccacacaaccaataaaatagttaaaagactaaccataccaaattacggagaggatatgaagcaactggaactctcatacattgctggatggagtgtaaactggaacaaccacatgagagcttcgtagtatctattaaacattagcctaccctatgatctagcaatgccactcctaagtattaacccgggagaaaagccttcatgtgttcaccaaaaacacagcagagtgttcacagctgcagcatcatttgtaacagccccaaattggaagctacccaaatatccatcaacaatgtaatcgactaatatactacaatatatccccagtatagtgagagctaagtacaattacactgaacaacatgaatgaatttcacaaacataatatataacaaaagaagcctggcataaaacagtacatgctgcataattgcatatatacatgaagttcaagaatgtgtaagacagccagatgcactggctcatgcctgtaatcccagcactttgggaggccaaggtgggcggatcacctgaggtcaggactagctttgccaacatggggaaaccctgtctctactaaaaatacaaaaattagccgggtgtgatgggtgcctgtaatcccagctactcaggaggctgaggcaggagaatcgtttgaacccaggaggcggaggttgcagtgagccaagattgcatcactgcactccagcctgggtgacaagagcaagactctgtctcaaaaaaaaaaaaaaaaaaaaaaaaaagaatgggtaaaactagttaatgatagaattctgaatagattgtgtgggggagaaattactgagaagtggtatgagggaagcatctcaggtcctggcaaagttctttgtatagatctaagagtgttacacagctgtacacttaagatttgcacactttatataggctctatgtatctattgacagcctcctgctctgttgcccaggctgaagggcagtggtatgatcatggcttcctgcagctgcaaagcactgggctcaagcgatcctctcatctcaacctcctgagtagctaggacttataggtgccagccaccatgcccggctaattttttatgtatgtatgtatttatggtagagttagggtctcactatgttgcccaggctggtctccagctcctggcctcaagtgatcctctcaccttggcctggcaaagtgctgggattacacgcatgagcctccacacttggcctacaaaaatttttttaactcttggaactatgctttggtagggatatggagcaataagatatttcaaacattgctgttcaagtacaaatttgtgcagccactcgggtatatattttgacactgtttagtaaagtggaagatatatgaaccggcaattctgctggtaaataaactcaagcatgtgtaccccatgtgaaagaatgtggctgtgttgtttataaaatgaaaagctataaataactaatagggcatcattactagaaaggatgaataattgtggtatacttcagaagggagaatatagcaaagaaattgaattaaccgcgattttatctaatagggatgattcacagaattgtaaaaataaaccaaagacagtatgacaacattcatataaagttttaaaacggggaaaaactggagtataatgcctagagaagtatacgtaagtgataaaacctcacactgtgtgacttaccctgccacacaaacctgatcacactcccaccatggggacattcagctacagacaatccacgcccaaagcaacagggtcgcacacgcagggcctctatcggtcacataagcacaagtgcacgcttaccgaggaggcagtcacagtcacaaccacattgtcacagtcggcgcacacctgtaccgggtcacagtcacgatcacacattaaccacagccacacacacagatagaaacatgcagttactcgcaggtatccccacctgaactctgccgcacacagtcacacagcatatagtcgcacaccactacggggacaaacgcagtaacactcaaccaggcacaagctccccacagccgcacacacaatgccgcacgtggtcctgctccctctcacacacacaccagcagccacagtctccgaggccgtgctgcacacggtgtgagcgttggaaacacactcatcacaagggcagcctgtcacaatcgcgcgatcattcaccacacacctccacacagacgcaagcgcacgctttcaatctcacctccaccgccgcacaaagccgaggcttggcccccggccccgccctctcccgggtttctcacctcaggccttaccagctttcgaagcagcagaaccctccccggcactggggtagttgctggtaaagccctgagggtcccgccagcgcgtgagttggaagctgaattaccgcgagaagtacagtcttgccgaggagacctctgggaagcgtagtcagagacgtatcaaggccggacaagatggttcccgatcgtcagaattcctgtccgcgccttgcgtcagccccgccgaaaggatcgccccccctagtcaaaccgctcgcgccccagaggcctcatggagtcccgcctcaggctcgggccttggcccccaaagaaagccactccgacgtgtttgagatgggcttagttcccggacccgtcctactgcccccaggcgctggacagcctcagaaagaggacaagtctgcatggaaagataatcgcacaactgagccttctgggagatgtagttcggagctgggaaggcggttggaccctccgaaagtcatcttaattgctctcacagataagccggtgctgggctgccggcctgagtactgtgcgcccagagtgcgcaggcgcaaacatcctgggttgctgttttggcctctttgttcgggcgtgaattttgtttattgctccttagtgcagaggggttatgggaccagaggttgtgagactcagaagtggttggggacgcagaaggggtgtagaccaggaacctgcgacctgatggggggaggtcgaagggaaaggaatcgccaaacgtgggacaggtttggagaggcagaaagagaggagtctgaaattgcaaagggcaggtgttattctgacttctgtgtgctttgtgataaatgagtggggcaggaagtaagaggagtttcactttctccttctgcaattatttgtgtacttggactaagtgtatctcatggccagtatttgactgcttttgacctataaaggtattgtatacacagtcatgcatagtttaataataaggatatatgctctccccacggtctccctctccctctctttccacggtctccctctgatgccgagccaaagctggactgtactgctgccctctcggctcactgcaacctccctgcctgattctcctgcctcagcctgccgagtgcctgcgattgcaggcgcgcgccgccacgcctgactggttttcgtatttttttggtctccaccaaacacagggtttcgctgtgttggccgggctggtctccagctcctaaccgcgagtggtccgccagcctcggcctcccgaggtgccgggattgcagacggagtcttgttcactcagtgctcaatggtgcccaggctggagtgcagtggcgtgatctcggctcgctacaacctcctcccagccgcctgctttggccccccaaagagccgagattgcagcctctgccccgccgccaccccatctgggaagtgaggagcttctctgcctggccgcccatcgtctgggatgtgaggagcccctctgcctggctgcccagtctggaaagtgaggagcgtctctgccaggccgcccatcgtctgggatgtggggagcgcctctgccccgccgccccgtctgggatgtgaggaacgcctctgcctggccgcgaccccgtctgggaggtgaggagcgtctctgcccggccgccccgtctgagaagtgagaccctctgcctggcaaccgccccgtctgagaagtgaggagcccctccgcccggcagccgccccgtctgagaagtgaggagcccctccgtccggcagccaccccgtctgggaagtgaggagcgtctccgcccggcagccaccccatccgggagggaggtgggggtcacccccgccaggccagccgccccgtccgggagggaggtgggggggtcagccccccgcccggccagccgccccgttcgggagggaggtgggggggtcagtcccccgcccggccagccgccccgtccgggaggcgaggggcgcctctgcctggccacccctactgggaattgaggagcccctctgcccggccagccgccccgtccgggagggaggtgggggggggtcagccccccgcccggccagcctctccgtccgggaggtgaggggcgcctctgcccggccgcccctactgggaagtgaggagcccctctgcctggccacgaccccatctgggaggtgtacccaacagctcattgagaacgggccatgatgacaatggcggtgttgtggaatagaaaggcgggaaaggtggggaaaagattgagaaatcggatggttgccgtgtctgtgtagaaagacgtagatatgggagtcttttcattttgttctgtactaagaaaaattcttctgccttgggatcctgttgatctgtgaccttacccccaaccctgtgctctctgaaacatgtgctgtgtccactcagggttaaatggattaagggcggtgcaagatgtgctttgttaaacagatgcttgaaggcagcatgctcgttaagagtcatcaccactccctaatcttaagtacccagggacacaaacactgccgaaggccgcagggtcctctgcctaggaaaaccagagacctttgttcacttgtttatctgctgacattccctccactatcgtcctatgaccctgccaaatccccctctgcaagaaacacccaagaatgatcaattaaaaaaaaataaataaataaataataaggatatattctggccgggtgcggtggttcacgcctgaaatcccagcactttgggaggctgaggggtttgagaccagcctgggcaacatggtgtaaaccccgtctatactaaaaatgcaaaaattagccgggcatggtggtgcgcgcctgtagtcccagctactcgggaggctgaggcaggagaatcgcttgaacccaggaggcagaggttgcagtgagccaagattgcaccactgcactccagcctgggcgacagagtgagactcggtctcaaaaaaaaaaaggatacattctgagaaatgcattgttgggcaatttcatcattatggagtgtactgacacaaacctagatggtatagctgactgaacacttaggctacatggtataacctgttgctcctaaactacaaagctatacagtatgttactgtactgaatacagttggaacactgtagggaccagccctacaaggtctgtgggtttttctccctgtgtgcagagactagaggtggtagaaataaagacacaagacaaagagataaaagacacctgggcccgggtgagccactaccaccaagacacagagactgatagtggccccgaatgccaggctgcactgttatttattggatacaagacaaggggggcagggtaaggagtgtgagccatctccaatgataggtaaggtcacgtgggtcacgtgtccactggacagggggcccttccctgtttggcagctgaagcggagagagagagaagacagcttacgcattatttctgcatatcagagacttttagtactttcactaattttgttactgctatctagaaggcagggccaggtgtacaggatggaacatgaaagcggaccagtagtgtgaccactgaagcacagcatcacaggaagacggttagacctccagataactgcgggcgggcctgactcatgtcaggccctccacaagacatggtggagtagagtcttctctaaactcccccggggaaagggagactccctttgctggtctgctaagtagtgggtgcttttccttggcactgacgctactgctagaccacaatccgcttggtaacaggcgtcttcccagacgctaacgttccgctagaccaaggagccctctggtggccctgtccgggcataacagaggctcacacacttgtcttctggtcacttctcaccatgtcccttcagctcatacctctgtatggcctggtttttcctaggttatgattgtagagtgaagattattataatatttgaataaagagtaattactacaaactaatgattagtgatacttgtgtataatcatatctgtgatctgtatctagtgtaattcttgttattttatatattttattatactgaaacagcccatgccctcggtctcttgcctcggcacctgggtggcttgctgcccacagaacacaatggtaagtatttatgtatctaaacatatctaaacacacaaaaggtacagtaaaaaaaacagcatgaaaagtaaaaaatggtacacttgtatagggtacttaccaagaatggaggctgcaggactggaagttgctctggagagtcgatgagaggtgagtgaatgtgaaggctaggacattacagtacaacactctagactttataaacattgtacacttaagcaacactacatgtatttaaagtttttcttccataataaattaacccttgcttgctgtaacttttctactttataaatgttcaaatttttaaaagctttttgacttttctgtaatatcgcttagcttaaaacacaaatacattgcacagcccatgtgggatccgtatctcttggtaaggaaatgttgcaggtcagatgtcattcttatgtggccacatagaggtagaaagactgcatatatgatactgcctttcccaaccacgggctcgtattctaacataccgcaacaatgcccaatatttatggggtcatagaaaataggattcactatggttggagaatttccagagccaatttaagttcaggaatgctggcaatgagaatgatcagtaggaatcagtgtaatgatttacatagttgaaactatcaactgggccaggctggtggctcacgcctataatcccagcactttgtgaggctgaggtgggctgatcacctgaggtcaggagtttgagactagcctgggcaacatggtgaaaccccgtctctactaaaaatacaaaaattagctaggcatggtggcacacacctgtgataccagctactcgggaggccaaggcaggagaactgcttgaacttgggaggcagaggttgcagccagccaagatcatgccactgcattcaagcttgggtgacagagcaaagactccatctcaaaaaaaaagttaaaatagaataaaacatatagccattatttttctgtttggggcaattttaaagtttttcttttgtcacaaaaacaggaatgtactatgcaaaggcttgaaataggccatcttttttttttttttttttgagttggagtttcgctcttgttgcccaggcaggctggagtgcaatggcatgatctcggctcaccacaacctccatctcctgggttcaagcaattctcctgcctcagcctcccaagtagctgggattacaggcatgcactaccacgcgtggctaattttgggtttctagtagagacgggatttctccatgttggtcaggctggtctcgaactcccgatctcaggtgatctgcctgcctcggtctgtcaaagtgctgggattacaggcatgagccactgtgcctggaaaataggccatctttttaaacaaaaaggcaatgattcacaaaagtctatgaatagaacatgtaactagttgatacaaatctaataggatttgtttaaaatcagtcaaatctaatacatctgaagtgttcttgtataaagtatcacatgaagaaaagaagaatttattaatgtcttaaaaaaatgggtttcttcatagacaatatgacaacttaccattaaaagtgtttcgggacggccgggtgcagtggcttacgcctgtaatcccagcactttgggaggccgaggcgggtggatcacgaggtcaggagatcgagaccatcctggctaacacagtgaaaccccatctctactaaaaatacaaaaaattagccgggcatggtggcgggtgcctgtagtcccagctactcgggaggctgaggcaggagaatggcgtgaacctgggaggcagggcctgcagtgagccgagatcgtgccactgcactccagcccgggcgacagagcaagactccatctcaaaaaaaaaaaaaaaaaaaaagtgtttcaggagacataaggaaatgcaacattattcttcctgaacacttttagttcaagactttccactcaataaaataggaaaggatctgaaactgagaaaatgtatttgagtacaaacagcttgtgaaacataatacttttttttgcatcatcagagggttttactgaacttataaccaacttgcccactcagtatgcaattcagatgtgagtgaggggccgggcgcagtggctcactcctgtaatcacagcactttggaaggcagaggcgggcgagtcacctgaggtcaggagttcgagaccagtctgaccaacatggtggaacctagtctctaccaaaaatacaaaaattagctgggcgtggtggtgtacacttgtaatcctaggtactccggaggctgaggcaggagaatcgcttgaacctgggaggcagagattgcagtgagtccagatctcgccattgcactccagcctgggtgacagagcaagactccatctcaaaacaaaacaaaacaaaaaaaacagatgtgagaggacagaggtgtctcacaggagcctgtactgtcttcaatcctatgtgtgcaggtatctaccacaggcaaacagtttctccacattttgtagttatatgatcttgctactagcaaaaagaggtaaacagcccctgtagaatgaagggactacagtcacgggactagagtcacagaatgaagctttcctcttaatattttttaatttgatgtttgaactctttttcttttttccttgagacagtcttgctctttcgcccaggctagagtgcagtggcacgatcttggcttactgccacctcctgtgttcaaacaattctcctgcctcagcctccggagtagctgggattacaggcgctcgccaccacacccagctaatttttgtatttttagtagagacggggtttcaccatgttggccaggctggtctcaaactccttacctcaggtgatccacccgcctcgggctcccaagtgctgggattacaggcatgagccactgcgcatggcccgatgtttgaactctcaatgcagcatcctagagaagggtgttcgggacctcctgtgcccaagggaccgataaagaaaaaagctccatttattatttgggatttgatgcacagatgaaaaacttaacacacaataacggaagtcggttgttagtaaatcacatcctagtctttcagcacttccataagagacgacatcttcagttgtctagttcttgtagttttagcacggcaacatcaatgatgcctatgtccagaatcagttaaaaagaccataatttgtttctcttagttcatctatttttcactggctcatggtcccaagtgtatctgaatgattacctttgggcattctctgctattgcttattagggtgctgtcgattgtccccatgttttgtgggctggttgggaaggggagcttgggaaggatgtgtcactctcaggaggttgtaagtcattgggacgcctccagggatgattccttccatggctgcaggaagtcctcctggagccacgcccacgatgcctggcggatatctgtatgttgcaccgttgagctcgggatgaattgcttgctggtctattgctgaccaaggcgctgatgtgacaaataactccttgttcacacagtttcttaagctttctgggacgcgacctgtgatgactcggcggatctcggtggcagctgcctccttcatctccagtgacgcctgcatgctgtcctaggcagtgtgaggagtgaagatgagatttggcgcatctttcaacggagtctgagcaaagctaaagggctccgattcgtgcaagccaagggctgcccctcctatcctgtcctccttgaggacctgtgctaaggctttctcatccaccaggccaccatgggctgcgttcacaaggaatgctccctgtctcatctgctttatagtaaagtcattgacgaggtggtggttatgttcattgagattgcagtgcaacgagacacagtcactctgatacagcaaaccctgcagggtgtatcagggtcccctctgcatgccctgggacctctctatcttgtcctacaagtaggggtcataaaatacgacgctgaatccaaaggccttggctcaaactgcaaccgcctgcctcatgcaaccgaagcccatgaggcctagcgtcttccacgaatgagggccactcccatggccacctcgagaatctgctccacgctctgaacccgcgcgccttcccacagtgtctggtacagccacatattcctccggcagagattgaggatgtggcagatagtggagttggctgcctcttccacggctgtggaggggatgttgcacatagtaatccggagctcactggcagccttgatgtccacgttgtcgtagccacttgcctatccacacgatcactctcagggccttgaacttctccaggtcctcccttgtttagaatcttctcgtggatctcctgcgtggactgtgcgtcacagaaggccacagtggccaggtccttcaggatgggcatctccacggtgcaggtcacagccatccagcggcgccagcagcgggagggggtgcagggggctgttcgtgatctgagggtggatagcttcacaagttctgtccaatcgctgtctcgtgattttgtgcttatccaccagggccattctttatggaactttgcaactctcagatcaaaaggcaaagcaggcctggcatggtgcctcatgcctgtaatcccagcacttgggaggctgaggcaggcagatcacttgaggtcaggagtttgagaccagcctggccaacatggggaaacaccatctttactaaaaatataaaaattagctgggcatggtggcgcgctcctgtaatcccagctactcgggaggctgaggcaggagaatcacttgaacccgggagtcagaggttgctgtgagctgagatcatgccactgcactccagcctgagtggcagagtgagactctgtctccaaaaaccaaaccaaaacaaacaacaacaacaaaacaaaaggcaaagcagtcctctaaaaacttacggaaactcgcaggagtgtgtgtgcatgacgccactatgaacccaatacatatctgtccacaaactctatagttcacaggatgggctgtccatcttttctttctttctttctttctttttgtcgccaggctggagtgcagtggcgcgatctcagctcactgcaatctccacctcccgggttcaaacgattgtcctgcctcagcctcctgagtagctgggattacaggtgcacaccaccacacctggctattttttgtattttagtagagacggggtttcaccatgttggacaggatggtctcgatcttctgaactcgtgatccacctgccttggcctcccaaagcgctgggattacaggtgtgagccactagctgtccatctttttaagggaatgcagcttcgtcagttcaaaaacatttaaggtgatgaaaccctcgtcctgggcagtcagcatccacagcggaaaggctcccgcccctcccaccccacctggaggctgtgctgcctcagttcagtgcagcatggctcctggttcagtccttcgctcctcgggccgctcccaagccaccttaaaatgacacactgaatttggattattattattatctttttttttttcagacagagtcttgcagttgtcgcccaggctggagtgcagtggcgcaatttcggctcactgcaacctccgcctcctgggttcaagcaattgtcctgcctcagcctcccaagtagctgggattacaggcacctgccaccacgcccagctaatttttgtatttttggtagagacggggtttcaccatgttggccaggctggtcttgaactcctgacctcaggtgatccaccctccttggcctcccaaagtgctaagattacaggtatgagccaccaaccctggtctaaacatttatttttttaatttcttttttctttttttttttcttttttgagacagagtctcactctgttgcccaggctggagtgcactggcacgatctcagcttactgcatcctctgcctcccgggttccagtaattctcctgcctcagcctccagagtagctgggactacaggtgcccgccaccatgcccagctaatttttgtacttttagtagagacaggctttcaccatattggccaggctgatctcgaactcctgaccttgtgatctgcctgcctcggcctcctaaagtgctgggattacaggcgtgagccactgtgcccggctattttttatttttttgagacggactctcggctcactgcaaacctctgcctcctgggttcaagcgattctcctgcctcagcctcctgactaactggattacaggcatgtgccaccatgcctggttaatttttgtatttttagtagagacggggtttcaccatgt[137 bp omitted]atctactatatattttttatattttcattttatttttaattaagaagtaataattgcatgtatttatggggtacaatttgatgtgtacattgtatacatcgtgatgtgtacacaatgacacgtgtacattgtggaatgattgaatcagcttttccaagtgtgtttccttctcagcacctccaaacctctcctcaagttaaccccaggccttgagagaaacaaagtgctctcccttaaactgggtcgctttggttctcagtggaaagttgagtcacagagggaggctctctttcatgtgcttgggtttcactcacttttatcagctggacactgccgcaggggctgattgctcccactcccttccccaggttctgggttatcgttcatgattccagtggatttccatttttcttcttgaaataaagtacatggagtttatctttatgcactatcatgctatccccaagtgactgaggcattctctaatctgccatcttggaggaagaaaagttttaactttgatatcacagtttacatataatttgtatcaattaacaaattattgtagctatgggtgttttgtagtagttttgtcttttttttttttttaagtcagagtcttgctctgttgcccaggctgttgtgcagtggcgtgatcttggctcactgcaccctacaccttccaggttcaagcaattctcctgcctcagcctcccaagtagctgggactacaggtgcgtgccatcatgcccggctaattttttgtagttttagtagagatggggtttcaccatgctgggcaggctggtcttgaactcctgacctcgtgatccccctgcctgggcctcccaagtgctgggattataggcgtgagccaccgcgcctggccaccagttttgtcttttaatcttcaaactagagagagaattgatttacacctcaccattacggtattagaatgttgtgaatttcacaatgtacttattttttacctataagttcgttttcgttttttttttttttttttttttttttttttttgagatggagtctcattctgtcacccaggctggagtgcagtggtgcgatctctgctcactgcaacctctgccttgcaggttcaagtgaatctctgcctcagcttcccgagtagctggattataggcatgtgccaccatgcccagctaatttttgtatttttagtagagatagggtttcaccatgttggccaggctggtcttggatttctgacctcaagtgatctgcctgccttggccttccaaagtgttgggattacaggcgtgagccagctcgcctggccagttttatatactttcatgttttcatgttactaataaatgactttttccttcagcttgaagaattctctttagcatttcttgtagggcagatataggagtgttaaacaccttcaacttttgtttgtctgagaaagtcttaatttctccttcatttttgaaatacaggttatctgagtatagtattctcacatggcagttgttttctttctaacaatgtatcatcccactcccttctggcctgcaagatttctgctgaaaaatccactgatgatcttattgaggtgactttgtacatatgtgaacataagaagtcactttttccttgctcctttaaagattctctctttgtgtttaacttttgaaaatttgattataatgcacatctgtgtgggtttcttttgatttctcctatttggtgtctttttggctgcttcgatctggatttatatttcctttcacaggcttgggaagttttctgccgttatttctttatctaagctctctgtctccttctcttttatccttctgaccctttggcaatgtgtgtattggtctgcttgatggtgttccaaaagtcccttatgctgtcttcactattttatattcttttgctcctcagattggatgatttccaatgacctgtttctgagtttgttgatcctttcttctgcttgaactagtctgatactgaaccctttattgcatttttcagttcagttgttgtactcttcagcgctaatatttcttttcttttttttttttttaaacagagtcttctctgtcccctaggctggagtgcagtggcacgatcttggctcagtgcaacctctgcctccgggttcaagcaattctcctgctcagcctcccaagtagctgggattacagttgcacgtcaccacgcccagctaattttttgtatttttagtagagatggcgtttcaccatgttggccaggctggtctcaaactccttacctcaggtgatccacctgcctgggcctcccaaagtgctgggattacaggcataaacctccctacttggccatccctaagatttctgtttggtactttttttatattttctgtttattgaaattctcaagattgttcatgcattgctctcctcaccttggtgagcatctttgtgatgattcttttgaattgcctgttgggtaaatcacattatctccatttcagtagggttggtttctggaaattaattttgttctattatttggaacatatttccctgtttcttcattttccttgtatctctgtgttggtttctgtgtattaataagaaaacagtctcagttttttcacactggcctcacatagaacagcctaatcaataagtctaaggttcctctcacatttttgtgtttgtccaaactgcagtctctgtttttagtgacccctaggagattaggatgtgccaagacctagcagtactctgagtcaggtaagatagaaaccagtccctctagatgcagctggaaagattggggcattagctatgtcttccacttcattttatcctcagggtgaagctgagaggagtttatctccaagtctctctgcattaagtcagggagtgtatctgtagcaaatgcctgcactcttcttcagattgcgtgttctgatcctctgctggacgtgggatcattgaatgtccacatctttattttctgtggtctagggaggctcgggaatgctgagctcaatcaacttacagagctaggtggttatagaggcaaccccatggaagggagctgtagaagttatggcactcaatgcatggacaaactccttcagggagcatctacatacctggctttattgctcgagcaaactgagggggaaaagcgcaggaaatgcctaagctcctgttcaggttcccatatgtctattgcttttctaccccactggtttccaggtgcaggatagattctcaaaccggagttgaaaaagtgtgcagatggacacttccagagagaaactgagaggtgtgcactttagaccattctctgcactgatcctgagatg[144 bp omitted]gagaaaccttgtctctactaaatatacaaaattagcaggctgtggtggcgcatgcctgtaatcccagctactcgggagcctgaggcaggagaattgctgaacctgggaggcggaggttgccgtgagcccagatcgcaccactgcactccagcctgggcaacaagagcgaaactccgtctcaaaaaacaaaaacaaaaacaaacaaacaaaaaagccacctctttattctgtgatctagagaaactagtgaatgccaagtcctttcgttcccaattttagatggtttaggatggagcctcctagttgggagctgtgaaaactggggcactctatgtgtggaaatcgctttttttttttttttggaagaatctgtagacatggagtaagccacggggagacttggaaagtgccaaacttccatttaggctcccaagggtctataccctgttagatgtaggctggttagaagcctgtcacgcagcaactggaggagtgttctgggaaaccccttctgtggcaaaagacaaataaaataaatttgccatcttaagactttttttttttttttgagatggagtcttgctctgttgcccaggttggagtgcaatggcactatctcggctcactgcaagctccgcctcctgggttcacgacattctcgtgcctcagcctcccaagtagctgagactacaagcgtctgccaccacgcccggctgattttttgtatttttagtagagacggggtttcacca[140 bp omitted]ctggagtgcagtggtgcaattttggctcattgcaacctccgactcctgggttcaagcgattcttctgcctcagcctcccaagtagctgggattacaggtgcccaccaatgcacccggctaattttttttttttttttgtatttgtagtagagacagggtttcaatatgttggccaggctggtctcgcactcctgacctcgtgatcagctcacctcagcctcccaaactgttgggaatacaggcgtgagccaccgcacccggcccccatcttagacattttaaagtgtactgttcagtggtattaaatacattcataatgttgtgcaaccatcaccaccacccatctttataattcttttcatcctgtcataatgaaaatctatacccattaaacaattaactccccattcttcttctctgctaaaaaccataattctactgtccctatgattttgactactttaagtaccttggataagtggaatcatatagtatggtctttttgtgactggaatatttcacttagcattatgtgctcaaagttcatccacattgtagcctattacagaatgtccttcattttcgaggcctaatactattccactgtatgtatataccacattttgcttacccattcatctatctataggcactggggttgcctccatgttttcggtattatgaataacgctgctataaacatgagtgtttgagtactttctttcaattcttttaagtatatactcagaaatggaattgtttaatcatatggtagttgtaggtttaatgtttttctcttttcttttggagacagagtctctctctgttgcccagacaggagtgcagtggtgagaccacagctcactgcagcctcaatctctagggttcaagcaatcctcccacctcaacctcctgagcagccttctgaggtggcaagggctgaagttgctgtggactgatgtgaatacactgctggaaacttgggataacttggatctgtgccactgctaacattatcatgacattatcaagaattcagggagcggtggctgacgcctgtaatcccagcactttggaaggctgaggcgggtggatcacttgaggtcaggagttcaagaccagcctggccaacatggtgaaaccctgtctctaccaaaaatacaaaaattagctgggtgtggtggcaggtgcctgtaatcccagctacttaggaggctgaggcaggagaatcacttgaacccgggaggtggaggttgcagtgagctgagatctcaccactgcactctagcctgggcaacagtgcaagactcaaaaagtctggccaggcgcggtgcctcatgcctgtaatcccagtactttgggaggccgaggcaggtggatcacctgaagttgagagttcgagaccagcctgaccaacatggagaagcactgtctctactaaaaatacaaaactatccgagtgtggtggtgtatgcctgtaatcccagctactcgggaggatgaggcagtagaatcatgccactgcactccagcctgggcaacaagagcaaaactctgtctcaaaaaaaaaaaaagtttgacttaggggcataaagtacaggtgcacaccaccacagccagcgaatttttatattttttgtagaggttgcccaggctggtctggaactcctgggctcaagagatccccttgtaagtggctgggcgcggcggctctcgcctgtaatcccagcactttgggaggccgaggtgggcagatcacgaggtcaggagattgagaccatcctggctaacacggtgaaaccctgtctccactaaaaatacaaaaaaattagctgggcgtggtggcgggcgcctgtagtcccagctactcaggaggctgaggcaggagaatggcgtgaacccgggaggcggagcttgcagtgagccgagatcgcgccactgccctccagcctgggcaacacagtaagactccatctcaaaaaaataaaataaaaaagagatcccctcctctcagcgtcccaaagtgctatatgtttaatttttggaggaactactctatttttttccacagtggctgcaccattttacaccctcatcaacagggcataagagttcccatttctttttttttttttttttttttttttggaggtggagtcttgctctgtcatccagactggactgcagtggctaatttttttgtattttgtagagaccatgttgtccaggcaggtctcgaactcctgagctcaggcagtctgcctgtcttggccttccaaagtgttaggattacaggcatgagccacggcgccaggccaggttcccatttcttttgatccttgtaaacacttgttattttgtgtattttgtttaatagctatcctaatgggtgagttggtaatcacattttagttttgatttgcaaagcactggcgcatgaaaaaatcttgggccgggtgcagtggctcacgcctgtaatcccaacactttgggaggccgaggcaggcggatcacctgaggtcaggagttcaagactggcctggccaacatggggaatcctcatctctactaaaaatacaaaaattagccgggcacgatggtgtgcacctgtaatcccagctactcgggaggctgaggcagagaactgcttgaacccgggaagcggaggttgcagtgagcctagattgtgctgctgcactccaacctgggcgacagagccagactgtgtctcaaaacaaaaaacaaacaaacaaaaaacttcttcggataaatggctatttaagtcatttacccttttgatctggttgtttgctttcattttgagtattaggaattttctatatattctggatattgatcacacatcagatacatgaataacttcaaatagtgactttgtctaatatctcagttt[136 bp omitted]cggtgaaaccccgtctccactaaaaatacaaaaaagttagccgggcatggtggcgggcacctgtagtcccagctactcgggaggctgaggcaggagaatggcatgaacccgggaggcagaacttgcagtgagccaagattgcgccactgtactccagcctgggcaacagagcgagactccgtctcaaaaaaaaaaaaaaaatcaattaggtaaatgtaaatgggatagacataaaaagacttttcatgtcatttgacatcgtaccattgtgttacttaattactggatacttactaaatgtcttggttggtaccaaataagattaaaaaaccaaaatatgaattgttgaacacaaatgtttgttcttggcattttaaatcttataaaaactctaaataggccaggtgtggtggctcacgcttgtaatcccagcactttgggaggccaaggtgggtggatcacgaggtcaggagttcaagaccagccttgctaacatggtgaaaccctgtctctactaaaaatacaaaaattagctgggtgtggtggcgggcacctgtaatcccagctactcgggaggctgaggcagagaattgcttgaacctgggaggtggaggttgaagtgagctgagatggcgccactgcattccagcctggtggacaggacagagtgagactctgtctcaaaaaaaaaaaaaaaaaaaaaggaaaagaaccaataggacagagagatgtaaacaaagttattaatatgaagatacatttttggtaaggcaagttaaaagcaaaagagaataactttgtatgagaaagaattttatgtgataaatattggtcctaaagtgatttttttttttaaaagaaagcataggacaaagcggaaagtcaaagtatgttgtcaaaggtctgaataagttgtgataaagttagtggtgacagagatctgaattaccccgttaacagtggtgtattcatacaagaccacagcaacttcagcctgtgccttctcagaagaaagaattcaactgaggggaagcagaaaaagagaccaaggcaagtttcagagcacgagtggaagtttattttaaaaagctttagaacagtaaagaaaggaaaattcacttgttagagagccaagcagatgcctgaaggtccaagaaagaaaagaccaaaaaaaaaaaaaaaagtctttggccgggtgcagtggctcacacctgtaatcccagcactttgggaggccgaggaggatgggtcacaaggtcaggagatcgagaccatcctggccaacatggtaaaaccccgtctctactaaaaatacaaaaattagctggacgtggtggcacacacctgtaatcccagctactcaggaggctgaggcagaagaatcgcttgaacctgggaggtggaggttgcagtgagccgagatcacgccactgcactccagcctgggtgacagagcaagacttcatctcaaaaaaaaaaaaaaaagactttaaccttgatcctaggactttatacattcacctctttcccatgattcttcccttagggtgggctccccaaatgcacagtgctttccttacccttgggaattgagcacacacagcatgtttagggagttatatacatgcccatctgaggcttttttcctttatctggtggcatgtggccctggaacatcatgtcgccattttgtctattaacacacatggccaagaatctgcttctccctgggtctgcactcaaattaacacttttaatgttaacaggtgtggaccatcaggagattgtccctccttggaattttcttttttttttttttttttttgagatgggagtctcactccgtcacccaggctggagtgccatggtgcaatctcagctcgctgcctctcgggttcaagcgattctcctgtctcagtctcccgagtagctgggactataggcatacgccaccatgcctggctaatttttgtatttttagtaatgacaaagtttcatcatgttggtcaggatggtcttgaactcctgatctcaaatgatccacctgccttggcctcccaaagtgttgagattacaggcgtgagccaccgagcccagcagaattatcatttttaaagaggcaatgtcaaaactgccatactattacctgacatttctagtgggtgggcagagagccctcacctgccttgctcaggcctaactacatgtaactataaaattcatgaaggattaatttacgcaagaaattttgtgtgtgaccaaattggctataattagaagacaattatttgtctaaatatttagctttgatattaaaatacactaaaatggccaggcgcaatggctcgcgcctgtaatcccaagcactttgggaggctaaggtgggcggatcatgaagtcaagagatcgagacaatcctgccaacattgtgaaacccagtctctactaaaaatacaaaaattagctgggtgtggtggtgcacgcctgcagtcccagctactcgggaggctgaggcagaagaatcgcttgaacccaggaggtggaggttgcagtgagccgagatcgcgccactgtactccagcctgggcaacagtgcgacactgtctcaacaacaacaacaacaacaaaaaaaaaaaaaaagaaagaaagaaagaaaagaaaacaatagccaggcatggtggcgcatgcctatagtcccagctacttgggaagctgaggtgggaggatggcttgagcctgggaggtggcagttgcagtgagccaagattgtgccacaatactccagcctgggcaatagagccagaccttaactcaagaaaagaaaaagggaggcaaaaagacaaataatcctatagaaaaatgagctaacaatatgaaaactctcaaagaggcaaatctgggagcaagtgaggtttatactcatcaaagaagcatacaattaagtagcatcataggatctattgtagagccagaggatatgttgttcttttggacctgactctgacaacatctattaaaaattttaaaataacatcaatcctttgatctaccaatcccttccctgtaatctgacccacagaaataaaaacaactgaaatctaaggggtgattacatgaatttttattgtaccatttcttatggtggcaaataagcaaactgtgagtaaacgagggcagctgaataaatttacagtatacaatattagagaatattatgttgcaattgctcatcttactctgaccatcataatcattctttttgctgggtccaggaccatggctaactcatggcacaaaaagctagtcctggtttggtctgaatttgagtcctagttattctggtgacttcaaggctacccaagcacatgggcaaaacacttaaaaaatatgaaagattatttaagtaaagcaaaatgaggaacagaagaagacagtttagattcatgtacacatacatatattttatttgggtatattacctcagaaaatcaacaactgtcattttcaatcttatctcaagaccaaccttcagaaatgctagtaagtgctacagtaatattaacattatattgagtttaaaagaaattaatatatttaaaatcagtctaaggttttaatgctgtatacccattttcataatcattcaaaaacatcaggccgggcacggtggctcacgcctgtaatcccagcacttcgggaggccaaggtgggcggatcacctgaggtcgggagttcaagaccagcctttggagaaaccccatctctactaaaaatacaaaattagccaggcgtggtggctcacacctgtaatcctagcactttgggaggccgaagcaggtggatcacctgaggtcaggaattcaagaccagcctggccaacatggtgcaactccgtctctactaaaaatacaaaattagccgggcatggtggcgcatgcctgtaatcccagctactcaagaggctgaggcaggagaaccacttgaacctgtgaggcagaggttgcagtgagccaagattgtgccattgcactgcagcctgggcaacaagaacaaaactccgtctcaaaaaaaaaaaaaaatcattagtagcgttctctgtcagtttattgtggaaagaaatcaagtaaacaaattctcaaaaagatttgcttcaaataagagaacactgtttaggtggaagatctcctttttcagcacggtcttcccaaggtaacaagggggttgggattgacttgggtgtgtctgacataattgagaaagaaatttagtctgcaggttaaaagtgaagctgaaatccaggagttaatgttttcctcaatggcttataaaaaaattgaagagtgacacagttttctcattttaaaagtggctaatttctaatgctaatactggttatgcagagtattaaaatttctgataaatgttttagtaaaaactaattctctccatgtctgtgcatatattatttaataatatgatccttaaatgtatgtgatccaaccaatctgtggcaaatcataacctccaagactatatacagattagaactacgtacagattatgtaaaatttactcttgtgacacatgagttattttaattgaatttaagttgccaccccaattaaaaattatttcatattttaaagataagattttagaaatatcttctacagaatattagtatctgactaggaatgtaagtccattatgtttcatgtacagcttcctcactcctatctggactttttaactttcagaagtttaaggaaataaatagcacgaatgatagaatgaacacaaatattaccaccacccagaattaatatttcgttatgtttacttagaatgtttctttttaataagaaatagatacaaaattgaagtatcctttaactaccatgcttggtaacatttcccttccacctcctttcttcctagaggtaaccactccacttttgggaactgagtatatacatatcctttcaatccattctttagttttacataatttatccataaccaattcttagtactagggctggttagtgttgattttattcaaattcacagaagcatcattacaatatgttcatcatttttcttcactctaattttttaaaaatatttctgttaatatatagacttaatttgtcacttaactgctagagagtactctactatgttactatcacattttattcatctatttcacaagagacagcatttgtttcccaacttctggctactataactcatggtgcaatgaactatacagctatagaccagtacatgactccctgtgttcatgtttcttgggtagatgcatatatatagtagttcccccttatccacagctttgctttccatggtttcagttacctgtagtcaccacagttcataaatagttgagaacagtacaataaggtattctgagagaaagatcatattcacataacttttatgattacagtatattgttataattgttccatattatgtttattattgttttaaatctcttgctgtgtctaatctgtaaactaaattttatcataggtatgtatatataagaaaaaaacatagacatagagtttggtcctatctgggttttaggtatccactgggggtcttagagtccatctcttgcagaaaataggggactaccatactcaagagtggaactaccgggtattctggaatgttttagaagttctttcctgccctaaggttttaaaaacatcttcttataaaactgttatattattaagtattgctttttgcattttagtctttagtactttaagaattcataagaaaaatattttatattatgatgggagatattatttttccatatgaagagtcaattaatttttaagtaatccatgatttccccaccaatctgggataccgcctctatcaattaccaattccccatatattcatgcacacatttctgaattcaatattctgtctcagtctcagttttatgactgcttcaacaacaaataattttgatgattctagttttacaattcatatatgtagcaaaacatcacaaaaatgataattttgtctcttaatttcaaatcctcatacatctcatatctatttcttaatgcatctgtaggccttccaggaacacattaagtagtgtccatgactagatcctaactttaatgagtatactcctagaagtacagcattgataatgcttgttgtgggagttttgggggtacgggttttctttacactataatacttattaaacatcatagtatttaagttttgaattgctgctgaaggacttcccacattcatgtcactttaatgtaaaatgaattttccaatacactattaagtgtaaaatctgctgaacgttttgctaaatccaaggcattcatagagaactttaatgagtatgaattctctggtgtctaatgtgatgtgacttttggctgaaagctttcccacattcactacactgataaggtttttcaccagtatggattctcatgtgcagagcaagggttgagaactgagaaaaggctttcccacattcattacaaccatagggtttctcacctgtatggcttctcatatgcacagtaagagatgagctttgacagaaggctttcccacagaccttacactcataaggcttatcacctgtatgaattctcacatgtacaataagtgatgtgattcgagagaaggcttttccacatttattacattcatagggtttctctcctgtatgaatattgtgatgtttaatgaggtattgcttctgcctgaagattgttccacattcattacatttgtagggtttctctccaatatgaattttctcatgctctgtgagatttgacttgccactgaaggctttcccacattccttacacgtataaggtttctctcctgtgtgacttctctggtgtctaatgaggcttgacttctgaatgaaagctttcccacaccctttacattcataaggtttctctccagtatggattctctgatgtataatgaggttttccttctggctaaaagcttttccacactcactacatttaaagggcttctttccagtatggatgttctgatgtttaatgaggtattgcttctggctgaaggctcttccacactgattacattcaaatggtttttctccagtatgaattttctcatgctcagtgagatatgctttgccgttaaaggctttgccacattccttacatgcatagggtttggttcctgtatgatttttctggtgtctgatgatggttggcatctgaatagaaactttttcacattcataaggtttctctccagtgtgatgtttctgatgagaaaggaagttttccttctggctgaaggcttttccacatttattacatttatatgccttctttcctgtgtgacttctaaggtgtagagtaagagatgagactcgagagcacactttaccacattcagtgcattcatgagatttctctccagtatgcattttcttatgctctacaaggttttgcttcaggctaaaagtttttctacattcattacattcataaggtttctctccagtatgaatttgatcatgctgaaggagatctgattcatgctgaagactttccaacatgcctatcatgcatgtgaatttaatcaggagatttccctagtatcaaataagatgtaataaggatgaaagctttcccacattcactaaattcatatggtgtattttcaatattaattctcaggtatctaatgaagttaaatttatgatggaagacttttctcacattgattaccctgagatgagatgattacaaaaagggataaaatgtaacattctctttatattcttaatggttcttatatagcttctcccatatttaggtatagattgtatataaattaggtttcaaattcttttaaactgagttccatacacagaagggtagtcttgaagaatcaatgactgttcagaggaaatactttgtttcctaaattttccctcagtctgtcttttcacagagaaagatgagacttaacttacaagtctttcatgttgcgtctttatctgtttataaacttcccaggcttcttctaaaaggaagtacaaaaaaatcataattgaaaaagttaatataatatatagtgcctggcatgtaataagcgtccaataaattaggttatcattatcatcaacataatatcactaacacctttgaagtttcccattattaatataatttcagaaatgtattactgtaaaatagattcttttttttttttgagatggaatttcgctcttgttgcccaggctggagggcaatggcgcgattttggctcaccgcaacctctgccttccaggttcaagcaattctcctgcctcagcctcccgagtagctgggactacaggagcccgccaccatgcctggctaatttttgtatttttagtagaggcaaggtttctc[131 bp omitted]tcattataaaataaagttcaaatacaaataacattcccaggtatgtgtaattttaattgcttttcaatgtaacccagcacacttcataaatcagtaaaatgagagaaaataaggctaggtatggtggttcacacctataatcccagcactttggaagggtgaggcaggaaaattgcttgaggccaggagtttgagagcagccttggtaacacagcgagactctcgtctctataaaaaatttaaaaactagccaggcatggtgcctgtagtcctagctactgaggagattgaggtgggcagattgcttaggcccaggatttcagggctgcaataagctatgatcgtgccagtgtctgggtgacagtgcaagactcggtcttttattttatttttttgggtcggagtcttgctctgtcgcccaggctggagcgcagtggcatgatctcggctcactgcaagctccgcctcctgggttcacgccattctcctgcctcagcttactgagcagctgggactacaggcgcccaccaccatgccctgccaattttttgtatttttagtagaaacggggtttcacca[136 bp omitted]gatgaaaggacaaatacttaaaagactgggagtgcataggaagacagggcaaaaataaaatgaacagaaaagtttaaataaggtgcttatttctatgtcttcccgaaacaccattaaaatgacagtaaaagggtgaagaaggacacataagaactaaacggttaagaagatatcagtggacaaaaagtattaggaggactagggatagtggctccttcctgtaatctcagcactttgggaggccaaggcaggaggactgcttgaggccaggagtttgagatcagcctaagcagcacagcaaggctttatctctacaaaaattttaaaaattaggtaggtgcagtagcatacacctgtagtcttagttacttgggaggttgaagtaggaggatcgcttgagcccaggagttcgaggctgcagtatgctatgatcatgccattgcaatccagcctaggtgacagagtatgaccttgtctctaaaaaaaaaaaagtattaggaaattttggaaagaaagcaaatagagaactgtaaattaacagcagaactgagtggtttaaagaaaagccagcagatgtgggggccaccttcacaggtctgtaacacagatattgacagatatgctctgtcagtggagaaactgggcaagagtggaaggcagggcttacaaaatgactgtgaaaggaccagctaatgccctgaactctcctagctggacagaaatgtgaagtttatcatccagacaaaaccaagaggctccaaatttagtgatgaccagcaaagtaatgagagcatcctagtaagagaagaatgagtaaaagtttatacacataacagaggctcttctactgttagagtccgagaatgctggtggttactagctgtcagatgatggaagaattattttcttttttctttctttctttttttttttttgggacggagtctcgctctgttgcccaggctggagtgcagtgcgatctcggctcactgcaacctctgcctcccgggtgaagggattctccggcatcagcctcccgagtagctgggattacaggtgcccgccaccacgctcggctaatttttgtatttttagttagagacggggcttcaccatgttggccaggctggtcttgaactcctgacctcatgatccacccgccttggcctcccaaagtgctgggaatacagccatgagccaccgcacccggcccggaagaattattttctgaaaaaatgagaagaccatgagaacacctacagatgctaacatttggaatcatctaacgaaacacatctatattactgattgatgcacagtgaaaaccaccatttcataagccccgcttacatacacaaattaatatagagctaaagatcagaaaacatttgatgaaagtcctaacatcaaaggcagatcaaacaaaatacaaggcaaagagcagaaaaactcacccatataatactacaattaatatcatggaaagttaggagattactattatcactgcaatgaaatattaacagtgttctataaagaggtgtttttagaaataaacaatatgaaattgatcttaaaaattcagtatgttggggaaagaaagtctagaaaatctcctagaataaaaaaaggaagaatggaggaaggcagaaagaaagagtgtaatggttggaacatttagtgggttagtggaagaatctggaaggatcagcatctactaaagaagttccaaagaaagtatgaagaaaaatgaatacaggacattttcaaagagctaataaagaacacttcccagaattacaaatcatgagtccacatacttagcaggcccattgagtacaaagaacattccatttaaaaagatagcggcgaaagcacatcaatacaaaatttcacctagggataaaaagaggatcctagtttgagaccggcctgtgcaacacagtgtgatcttgtctctactaaaaataaaaaagattatctgggtgtggtggcatatacatgtactcccttctacttggggaggctgagatggtacgatggcttgagcccaggagagtgagctatgattaccctactgaactccggcttgggcaagagtgagaccttgtcttaacaaaaaaaaaaaatcctaaatgttccaaaacatttatcctataaaaggaaataaaagaaaaagacataccacatcaaaaaggcatcagattgcaagacaatggataatcctaaccataagttacttccaacttagacttctaggttttacagttctgtctgaaagcttgggaagaatcaaaacacaaaaatggaaaactaagcaaacaaaacaaagaagcaaatattaattaaaagaaaagcaaaaggttatacaagaaatcaaacagagtcatagaaaatcatttggtttaccagtcaacaatgcttacagtgttatagttacgtaaatgcttacaaatgctttaataaaaaagcagtgatcttactagtatcagaagtcagaaggggaagtatgggtataacatactgggggtaacatttcagaaccccgttagtaactgagaaaacaaccactctcaacctctgaattcaaatccataaaatacaatataaataaaaagaaaaatgtatacacatttataacatattttattaatcagtttatcctatatcttgaaaatagattataaaccacctttttaaatgcccaaagaacattctgaaaatcagcccatacagtagcctgttccacaaagtagtaaaggatggacaaaatactctgaccaaaaaaacaaaaaacccaacacatagaaatgacagaacaaaaacaaaacctttcacttgtaaatttcaaaatctattggtttgaacaaaccctttggccagggaaaattaatgcttggagaatgaagttttagcataaaagcttacatcattttaaaaaaagtaataaaataagcactcaaagt[132 bp omitted]catggagaaaccccatctctactaaaaatacaaaattagccgggtgtggtggtgtgcgcctgtaatcccagctactcgggaggctgaggcaggagaaatgcttgaacccaggaggaggaagttgcagtgaaccaatattgtgccactgcactccagcctgggcaacagagtgagactctgtctcaaaaaaaaaaaaaaaagaaagaaagaaaaaggaaagaaaaacagaaaattagtaaaaataggaaaaagaaattaatgtattacaaacagaaaaagagaaataataaattcatgagtggattcttaaggaaaaacttaaaagaagtaagagtaaaaaagaaaaagatatttggaaataactatagatagaaaatatggatagtacagactattttgttaaaccccatgcaaatagaaaacttagcaagtataaccgatgcgaactgaaaccagaaaagacagaaaacctaaacagaaacataaacatagtacaaaatagggctgggtgtggtggctcacgcctgtaatcccagaactttagaaggctaaggcaggtggatcatttgagcccagcagttcaagaccagcactttgggaggccaaggcaggcagatcacaaggtcaggagatcgagaccactctggctaacatggtgaaaccccgtctgtactaaaaagacaaaaacaaaaaaaattagctaggcgtggtggcgggcgcctgtagtcccagctactctggaggctgaggcagaagaattacttgaacctgggaggcagaggttgcagtgagctgagatcgccccactgcaccccagcctgggtgacagagcgagattccgtctcaaaaaaaaaaaaaaaaaaaaaggaccagcctggccaacaccgtgagaccctgtctctacaaacaatttaaaaattaggtgggcgtagtggcaggtgcctgtagtcccagctgctcagaaggttgaggtaggaggattacttgagtcaggagttcaaggctgcagtgagctgtgatcatgccactgcactccagcctgggagacagagtaagaccttgtctcaaaaaaaaaaaaaagaaagaaagaaggaaaaaatagagctcttgccccttaaagcccaaggcatggatggcttagcatgtgaattttactaaactttgattagataatggtattatttattttgttttccacttacttttaaaaaattcatgaaaattggtatgatgcataacagatcaggacttatgctactatattccaaacaatccaaaagaaaattaaaaattacatctcctttgtaattaaaaccctacatccttcacacacttatcagaattgaatttttaacactgtaaatgacaatgctgaactgaactagaaaacataatcagaacaacaagtaaaatggttctttcaacatttatcccatggtttaaaaaatattctcaggaccaggtgcagtggcacacgcctgtaatcccagcacttggggaggatgaggcaggcagatcacctgaggtcaggagttcgagaccagtctggccaacatggtgaaactctgtctctactaaaaatacaaaaattagccaggcatggtggtgggcatctgtaaattccagctactcaggaggctgaggcaaaagaatcgcttgaacccgggaggcagacattgtagtgagccaagattgtgccactgcactccag[138 bp omitted]atggtgaaaccccgtctctactaaaaatacaaaaaattagctatgcttggtggtgggcgcctgttatcccagctacttgggaggatgaggcagcagaatcgcttgaacctgggaggcagagcttgcagtgagccgagatcgcgccactgcactccagcccaggtgacagtgtgagacttcatctcaaacaaataaaaaaaataaaataaaatgaaaaatgctttcaaaatataagtcaaaatgctctaatggcaagcaaactcttaat[138 bp omitted]catagtgaaaccctgtctctactagaaatacaaaaaattagctgggcgtggtgacatgttcctgtaatgccagctacacaggaggtggaggcaggagaatcgcttgaacctgggagatggaggttgtagtgagccgagatcacaccattgcactctggcctaggcaacaagagtgaaactccatctcaaaaaataaataaataaataaaataaaaaaaaacaccacaaggttggcaaactaaaagagtttttctggaacatggccatgtttatttattttcttgtccatgactactttcacagtataatgcttgagataagtagctgcaatggagaccctgtagcctacaaagacttaaatattaaccatctggccctttacagaaaaagcttgctgaactcctgtcctagagtagcaattcctccatcttctatctggctgaaaccaggttgcattgttgatccagctccaaccacaaccagataataaagagagaacctcggaggaatccatatgtttcagggaccataagcaccaaagttagcatgcaaatctggactattcaccacatgagtgttatgtgaccaagaaatcaattcctacattccttaaactggcactttgaagtttattatagtcacttagctttactgtgattagtacacttcttattgctttacatatcatgaatctgagatgcctaacaaatactaatcaccagcctggacctctctcctcaacaatcaattcaaatatccagctgactactcaacatttccacttggatgtctaatagtgatctaacttaccctgcccctattcaaactcttgctccagctcccaaaccaactcctctcaaattcttctcatctctttaaatagcaatctcattctccttgctgctcaaacaatacttctctttcagtcagattgcacactctttacaacctcgtagcttactggctattttggacaatcctcactgtgaccaccaaggtctaagccacatgtcttgccaggattatttaacagcctccttaccagtcttgctactttagctttcaactctttacagttctcaacacagcagccacagtaatcttgtcacagtccaatcacatcactgctctacttgaaagcctttttgtatcctcataaaaacatttagaagcatacagcagacactgttaacagtggctgcttctgggaaacaggggattgagggccaggaatgaagagacatacctgattgttttaattttctatcaagtatacatattaaattttgataataatagtattatttctttttttttttttttttgagatgggagtctcactctgtcgcccagactggagtgcagtggcatgatctcggctcactgcaacctccgcctcccaggttcaagtgattcttctgcctcaggctcctgagtagctgggattacaggcgtgtgccacctcgccaggctaatttttgtatttttagtagagactgggtttcac[132 bp omitted]gaactaataggaagtcagcactaatccctaagcctgtaatattgttaaaaagcaggaggtgacatagtgttgaactatgatggctggaggtaggaagacaatagaaaacaagagtaaggaagcaaaattcaattctgaggaatataacaatggaaggagaaagaatgatagaaagttaaaatgtaaagaaaagaatctacttgctagtctttgaaagtttttttattgatacataatagttatacatagaatgattaatttattttatttattattattattttttagacagagtctcactctgttgcccaggctggagtgcactggcacaatctcagctcactgcaagttccacctcccaggttcacgccattctcccacctcagcctcctgagtagctggaactacaggcgcccgccaccacacctggctaattttgtttttgtatttttagtaaagacggggtttcaccg[137 bp omitted]ttttttttttttttttattgatcattcttgggtgtttctcgcagagggggatttggcagggtcataggacaatagtggagggaaggtcagtagataaacaagtgaacaaaggtctctggttttcctaggcagaggaccctgcggccttccgcagtgtttgtgtccctgggtacttaagattagggagtggtgatgactcttaacgacatgctagtttttgaaaactaacagatctatgaaggactgaatgcttaaggaaacgcatctaggcatacagggaaaagtgaaaaatggagaatgttagtgaaaggaagaaaagtgaaattgaggctgtaaaaaaatcataaaattgaggctgcaaatgatgtagaatgactggcatccagaatagattttagaagagcaatcagtcctctagaatctgataaaagggatgcatagattcaggaagacagtctggaaatgtcatttaggtatctaaagaattcccagcaacagtcactctaaaagacaaaggctagtacgaaaatctcaaaaaaacaaacaaacaaacaaacaaaaaaaccccacaacaactcagaggctgcaaattctcactgaataactgcaataagtctttatctcattcatacctaccaggttcttgcttactcacacaaagagaaccttctttacatttctttctcaatcatctgttgctgttcttttaagtgctgactttaaacttgtgagcagaaaaatgacactggacttggatgttatggttggggaacaaagcagcatcccaaaattcagggagcgcccttagaactctaagaggttttgcagctcctgtggatatacaaggaagcaggcctgtgaaaaagaacaaagtaatgatgattctttggctttgacctacatgtgagcaaatggaaaaacagtatttgtacatagcacctcaggccagacccattatgccattcaaaagctctacacatttcaatggccgggcatggaagctcacgtctgtaatctcagcaccttgggaggccgaggcaggcagatcacttgagattaggagttcgagacccgcctggccaacatggtgaaaccctgtctctactaaaaatacaaaaattagccaggcgtggtggcatatgcctgtagtcccagctactcaggaggctgaggcaagagaatcacttgaagccaggaggcagaggttgcactgaaccaaggtcacgccactatacaccagcctaagcgacagtggagactccatctcaaggaaggaaaaaaaaaaaaaagctctaaacatttcaaaaatgagaaacagaagggaccttattttcagaatttaggttacacagagaaactatgagagactaagatgccagagttatccacaatcacaacctgtataggttccttcgagcaggtgtcacttgtgaccttgctcctgagtgaagtcacatctttgcatataatttttccccataacacttttctcataagtctgaagtaaccaaccttgagtgatatggaaaaaaatacaggaaattattctgatggtatttataggtcagagctctaaaaaatttagaggactaatattttacttagattaactaggagaagttaaatatagtaagtgtcctataataataatcttcccttgatatcacaggagattggttccaggatcactgtggatacca[141 bp omitted]gtgaaaccctgtctctactaaaaataaaaaaattagctgggcatggtggcacacacctgtacctcagctacttgggaggctgaggcaggagaatcgcttgaacccaggaggcagaggtggcagtgagccgagattgcaccactgcactccagtctgggtgacagagtgagactccatctcaaaaaaataaaaataaagtgaatggaagtatatttacatataacctatgcacatcctcccatatactttaaaattatctccagattacttatcatacgtaatacaacgtaaatgtctggtaaatagttgttatactgtattgtttagggaatcatgacaagaaaaaaaaatctgtacacgtacagatacaaccatcgcaagcttaacaacagttatgattcatgtttgttgaatccgtggaagcagagcctacagacacagagggctgactgttcattcactgattcagcaaacatatacatttatgattatgtgtgctgagaaaccttggtttacaatttgtaatgggatataacaaatcaaaggatcaaacttacttagaagccttctctaagatgtaagtgccttagaacctggctagacagtgctataaattgctgaaacaggtacagaggggaaatagatggaggcagactgcaggaagaaggagccctttagacataaagagcttgaagttccctgtaacttccaggtggactgcacattgggcaattagataatatggattaggagctcaggacaagcctccagcagaaacagacatttattagtcatctgtattagatgaagccatggatggcagtgtaatgttgttgctgataggagtacttagatgatcaaggccagaaacttagaaacaccaatagttaggggaaaagcagaaactaagtcctgtcttctttgtatcttttactttttctgtatatttcaaaactattaaccctgttacttttttattttattgaaaaatatgttaagaataagtgtgacaagatacttgaatatgttgatatgttaagaataagtgtgacaagatacttgaagataggatacttctatctttgtatacacaagaaaagaatttcccctatatttacaaaaggctggggaaaccctgattaaattaggagtgagattgctgccctcactgacgaactagggagtttcttgacctctgcgctaaaggcaggacaagtagcttccaaattctgtgccgtctgcgctattggaaactacctcttaaagatattccttagttcagggtttctccaagcaactgcaccaaagtttctccaaagtattaagaaaagtcaatgcctactgggtgtacaggcacccagtaacaagtttttccgaaatcttgcctctttaaaaaaataatggaaaggtaatgctgattttgttttctactccacaataggtctgcttttatataaaaaatcacctttaaaattacttatccgctcaattccttagccttttccgtttcctattttccagaaaacgcatctttattattttagaaatgagaaaagtgaggcttagaggttactacctcacaaagccatccgtccatcctcacaaacttggaaccagtttctcactaactctgcaccctcaacaccccctcacactctcggtcacccacccgcgaacccacccgaactgtacccctgcccccagccacacaagctcggatcaccgcacatcatagaaggcgattcctcccctccatactcccagccccgtcgcaggcactgcaaatcctcccctccagcgtccctggcccgtttcagtgtccagaaacccaagtcccacagggccgaaacccaactcaccggcagacaaagacgaccatggcaagtcggagattccgcgcctgcgcactccttccgcgggcagcgctcccagaggtctcctgggctgggccaggccccgactcagaaccggacggaatcgagagatcttggcccgtcctccgtgccactcttttgagggtagactacatttcccagaaggttcagcggtttgagtcagcttttcgcgcgaacttttcctccgccagagcttgtgggactgtctccctggccggggcaggggtgtaaggccttagtcttagtttactctatccctgggattgggtagtggtgtaacatcagcttaaacacgctgtgctgactttatgtaacagccacggtgcgatactaagccaggaaccccaggagactctcagacacggttcgggaatgagggtaatccctttggctgggctcaagccgggcgccatcttgctcatcgcgggcgtggcgctgaactacatttcccagaaggcgccgcgccctcggcccctcccctcgcgactcccgcggctcgggggagagctgcacgcgacccaggtgctggcctctgagcgggtcggctcggagactacaggatcaggaggaggttggaggtgaagcgtctggaatccggtgcggaggttgagactgagtattaagtctgttcaggcggaacgcgccgagaagggcggttgtgaaattgtgtttttgtgaatgtatgtcctagcacagtgtgtgtgtgattgtgattgtgtgtgacaccttgtgtacggatgtggggaggactctgcgggtgtcccgtgagtccctgtgttaggactgttattgtgtgactgtgtaacgctgtgtgagggtgtgggttagctgtgactgtgtgcccgcggtgggtgtgtgattgtaactctgtgaccatatgttcgtttgtgtgcagatatagggagctttgtacttatgtagttgtgactctgtgtccttgtgtgggagtatggagggtgggtgcttgtgactttgtgtacagtggtgggtgtgtgactgtgaagcattgggtgtgcgtggagttgagactgtgtttgtgtgtctttgaccaaatgtcacacatagtcatatgtgagagcagaagacagctcggccccgtgatagtaaaggggatttttctatgacactgagttttgagttggaagccccagtttcctctgatagccctcccatggcgggggaggggaacgcagagtaagctctggccttgtcatttgggccctaggggaggtgtattgtctcccttctcatttctgtcctccaagagaggttccccagaggagaggaaataacggttgtgatatctaaaagccatgtttaaggtgccttgaagttttctctttgttcctgaaatgctttatttttccaggacctgattttttttttttttgagatggagtctcgcactgtcgcccgggctggtgtgcagtggcgcgatctcggctcactgcaacctccgcctcccaggttcaagcgattctccttcctcagcctaccgagtagctaggattacaggtgccggccaccacgcccgggtaatttttttgttgttgtatttttagtagagacggggcttcactatgttggcctggcttgtcttgaactcctaaccttgtgaaccgtccacctcggcctcccaaagtgctgggattacaggcatgagccactgcgcccggctgattttttttttcttagcaaatgcctaaaaggacttatcaagtaacctggaatcttctgttactctttggaaaaatcttcctaattttgtcttattaatatagcaaatggttcagtttatcatgtatgcttagtttggttttacctatatacatatgtagatatatatgcatatacataaatatacatacacatatttgtatatgcacatattgaaatgtatctcatgttttaagtgatattttaacttcctacataattgaaagctatttgagaatatattaaattgtagatactgttaattgttttgccacatatgtggctaacccaatatccattcccttctttattgctataaaagtcctgatcttgtttgctctgcttaaagaaaaacaaacagaaaacaaacaaaaaacccaaactctacgtgttctagcttctcctgttgatgtaagttaaagttcttagattgggcttctcagacagtttttttttttttgaaatggagtcttcactcagtcacccaagttggagtgcagtagcgtgatctcagctcactgcaaccttcacctcccgggttcaagcggttctcctgcctcaggctcctgagtagctgggattacaggcgactgccaccatgcccggctaatttttgtgtttttagtagagatgaggtttccaccatgttggccaggctggtctcgaactcctgacctcaggtgatctgcctgcctaggcctcccaaagtgctgggattacaggcatgagctactgcacctggccactcaggcagttctttaaaggtatggggatggggtggggcaggctcagtgtgcatacattctttttcccctttctgtctggaatgtggatattgtgctacatgcagagcagctatctcataaccatgcatttttttttttttttttttgagacagaaacttgctctgttgcccagtctggagtgcggtggcgcaatctcagctcactgcaacctctgcctattgagttcaagtgatgctcctgcctcagcctcctgagtagctgggactacaggcgtgcaccaccatgcctggctaatttttgtatttttagaagagatggggtttcaccatgttggccaggctggtctcaaactcctgacctcaggtgatccgtctgcctcggcctcccaaagtgctgggattacaggtgtgagccaccatgcccggccataaccatgcatttataatggaaggaaggagatgagagtttacaatgtcatattaaatgaaaatagaggattttaagttatatatgttgtgtgaaagcaatttgattagaagatatgtatattctacctatctatgcatgaaatgtgtagttgcactttaattttcttcattgtaactagactcaagcttgtgaaagaagggacttgtctttttgtttagttgttccatcttcaccatttacaatggctagcacatagttggctctcagtaaatatttgattaatgaaagaatagtaagtagttaataaatgatagcagtgctacttagtttctttttggttgcacagaggaaacatgcccagattgccttaggtttctgttactctctgagattactctgtgttaactctacctctggggtagtgaagaggtatgccaaggggtgttataagccaacattcttcagactgggtataagttcttcatcatccataggacttttgatgttgggcgaaagatattcactgctttgattatttattgttttctttgattatttattaagtttctgtaaagcataaaatataaccaatttttctcacatttaaacttgattattaattttgattaatatatatttcttttttttttttttttttttttgagacagagtcttgctctgttgcccatgctggagtgtagtggcacactctcggctcactgcaacttccacctcctgggtgcaagcgagtctcctgccttagcctcctgagtagctgggattacaggtgcacaccaccacgcctggctaattttttgtatttttagtagagacggagtttcaccatgttggccaggctggtctcgaactcctgacctcaagcaatccgcccaccttggcctcccaaagggctgggattacaggaatgagccaccgcacccagccaattctttttttttttttttttttttgagacggagtctcactctgtcgtccaggctggcgtgcagtggcactgtctcggctcactgcaacctctgtgtcccaggttcaagcgattctcctgcctcagcctcccgagtagctgagattacaggtgcccaccaccactcccggctaaatttgtatttttagtagagatggggtttcgccatattggccaggctggtctcgaactcctgacctcaagtgatctgcctgccttggcctcccaaagtgctgggattacaggcatgagtcaccgcacctggccagatttggattcttaaatgccaattgagttcttaacagggaaatactagaagcatttccgttacataaggaaagagacaagaatatatgtatcaccattactatttaactttttttttttttcttgagattgagttttgctcttgttgcccaggctggagtgcaaagatgcgatctcggctcaccacaacctctgcctcccaggttcaagggattctcctgcctcagcctcccgagtagctaggattacaggcttgcgccaccatgcctggctaattttgtatgtgtatcagagacagggtttctccatgttgatcaggctggtctccaactcctgacctcaggtggtccacctgccttggcctcccaaagtgctggggttacaggcttgagccaccgcacccggcccttaacttttttttttttttttaagagatgcttggtagagtaattaaacaagtaaaaagattcagaggcaaaaaaattctgaaaagaggaaataacaatgacattaaatgcataattccataggaagtatgtctggaagataaatgtttatgtatatatttttaatcaccctctgaacctgaacttgagttaatcagactcatttatcactaatctttaaaagggctctattgatctgtttccaacaccatactctacttccattctccttctgctgtagacacattcaaaatgattaatttgttggacgcggtggctcacgcctgtaatcctagcactttgggaggatgaggcaggcggatcacctgagttcaggagtttgagaccagcccatccaacatggcaaaacccccatctctaccaaaaatacaaaattagccaggcgtggtcgtgcacacctgtaatcccagctactcgggaggctgaggcaggagaactgcttgaacctgggagatggaggttcccgtgatcgaggtcatggcattgcaatccagcctggatgactgagtgagactccaactcaaaaaaaaaaaaaaaaaaagattaattttatctttatgcttgaaaatgttcttacaaagcatatattttacatacgtgtattaaatatatatatatataaatgtctcctgttctttttcagtaatcatagtgtttttacaattatctgttactatgtaaacatttatttcaaggcattggtcacgttacctacctactcttccagggaatggacatgcagattgccttcataccctcccaccacaggaaatgctgaaattaataatctcatacatatccctttatgggccagtttgagaatttcttaggtcacagaatttctgggtcataggatatgagtttacttgactaagtggtgccagattctctccggattggttgtaggagtccagactcccaccagtatggaatgagagtttccatatcccacatctgtatgaacacagcactgtgtagctgtctcatagttatcagtctaaaaggtataaagtagtatttctttgtagtattaatgtgcatttctcattgccagtgattttgaatagcttttatgcttgttagctttttcagcttgtttgtaaattgccttttgtaccttttgttaaaatgtaattgggattagtctttttcttgttaatttgcaaatgtttatgttttctagatattaactctctgatagttttagactctgctgataccctcttatgtattattatactttttattaaacagaaatacttattttaatattattgttatgtgtttgtgtatatg[137 bp omitted]catggtgaaaccccatctctactaaaaatacaaaaattaatcgggcgtggtggcgggtgcctataatcccagctactcaggaggttgagtcaggagaatttcttgaacctaggagacggaggttgcagtgagccaagatcgtgccactgcactccagcctgggcaacaagagcaaaactctgtctcaaaaaagagagaaaaaaaaaagaaacatttttcttctctaaggtcacaaagaaattcttctacatttttgtctcttgactttgtagttctaccttacacagttaggtctttaacctattccagagtaaaattttgtattttcaaaaaaaaaactattctcccataattgtctctttcagcccttctctgtgagatggtattttttcctgcctctggatgaaatgtctgtcaagtgtcattatagtcattcttaagtaataaaaaatccagtagacaagatcagccttaatttgctaaatgaaatacctggtatattacaataattagtactctgaactgtttaaaattaagacttcttcctacaactgaatcttaggtaaagatggacacctgcatgagggaaggaatatgtgagcagcttccatttcccttccatggtcttctcagcttcctccaacagtagattgttcagcctccctaaagcaggagaagaggaaggggaagaaaggtaagagacagtaaaggtcttacttaactggtattgttataatcagtgtttggttctctcctgccttcatggatagtcaaagctgaccctttttcttattgttaggtgtttttccgggtttctaagcaaataccttgctgcagatcttcaactgcaggggagggcatgttgccagaacatcctgtttacagaggccacttaaaatccttacgttaaccctaggcatactgtggtcatccttttctggtgggtcacattggccctccagaagttctctagaacaggatccaagatctcctgaggtcagctcactccgtatggtccatatcctgtcaccacgtgggaattaagttcctatctctgtttctcctaaatggcaggaaaaaaggtaaagttctcctaagaactctcttaacacactcccctttggatcttagagggactgggatggatcgggtcaacttgcttggtttgattagaggaggaaacacccacctcctttcctcagggtgctgagaacacacccacagctcttcccaaaaatagtctcacctcacaaaaagtcctcttcctcagcctccccagcctctcacatgtccttgaggtatgttgaactgtagcaaaaattgtttatagccagtttcttttttttaattttaattttttaaaatatggtcagctgggcgcagtggctgcctgtaaccccagcaatttgggagggtgaggcgtgcgaatcacctgaggtcaggagttcgagaccagcctgaccaacatggagaaaccccatctctactaaaaatacaaaattaaccaggcatggtggcacatgcctgtaatcccagctactcaggaggctgaggcaggagaattgcttgaaccccggaggcagcggttgcagtgagctgagatcgtgccattgcactccagcctggatgacaagtctcaaaaaaaaaaaagaaaagaaaagaaaaaaaaagatagggtcttgctctgtactccaggcaaccttggctcactgcagcctcaacctcctggactcaagtagtcctcccacctcagcctcctgagtagctgggactacaagcacatgtcaccacatctggctaatttttatagttttttcctagacggcacccggcctagaaagcaattttaaacaatgagaaatttcaagaaggtgactggatataaaatatgccaaaatagtacacataatgtatatgatatacatatatatatgaaaacaacaaatagaagattcaattgagaaagttttaaaagaccccagcaatgatagacataaaaatatgttactaaggaataaaattagcaagaattggtataccttatgaagagaacttgaatatggagggactaatcagaaaacaagtgaaaaagcatagtataggatgcctcaaactcctaagggtttaaaacttaatttgtaataatttaatgtgatcccaatctgataattattttattaataaattaataattgttttattaaagacaagttaattctgaagttcatgtggaaaagtcaatatggcagaatagccaggaaaattctgaaaaagagtaattcagaacatttactctaccatatgtttaaacataaaataatagccttggctgggtgtggtggtttatacctgtaatcactaaaagcacttcgagaggctgaggtagatggatcatttgagcccaggagtttgagaccagcctgggcaacataatgaaacaccatctctacaaaaaatacagaaattagctgggtatgttgacacatgcatatagtctcagccatcctcccaaatgctttgggaggctaaggcgggaggatggcttgagcctgggaggtcaagactgcagtgagctgtgattgtactactgaatttcaccctgggtgacagagtgagaccgtctcaaaataaaataaaataaaataaaataaaataaaataaaataaaagtcttaaaatagcatggttctgacagatgagcagacggatcagtggagtggaagagaaactccagacccagtaggtagtgcagtattcttcatatggtaaagacagcatttctaattaggggcacacatatggatttagtacttcgtttataatatacaactgtatattgtaaccattgtagaggggaagaaaataggtcgttaacatttcatatctattattccaagtggatcagagattcaaatgtgaaatatgaaatcataaaaattctcgaaataatgtggaaaaaatgttagcctcaggacatggaaatcattctaagtctaacacaaatcctagaacccataattgaaaataataataaatttttttttttttgagacagagtgtcgctctgttgcccaggctggagtgcagtggtgcgatctcggctcactgcaagctccgcctcccgggtgcacgccattctcccacctcagcctccggagtagctggcactacaggcgcccgtcaccacgccggctaattttttgtatttttagtagagatggggtttcaccatgttagccaggatggtctcgatctcctgacctcgtgatccacccacctcggcctcccaaagtgctgggattacaggtgtgagccaccacgcccggcctaaattaatttttttacttggcaaaaactattaatgctaaaattccaaaagataattgatagcctgggaaaacttacctgcaacatatatcccagaaaaagttaattttaatgaaatgaaagtactgcatatctaataaggaggaaaaataatcaaaaagaaaataagcaagggatacagagatggttcatagaaaaggaacaaaaaatcgccttttggtatgcatgttttcatctgtttggactatcataacaaaatatcacaaactgagtagcttaaaaaacataaatttattttcttatagttttgaaggctggaagttcaagataggggtgccagtacagttgatttctggtgaagggctgtcttcctgacttgtagatggccacttgctttttgtgtcttgacatggctgttattccgcatgtgggaggagagaaagaaatctctggtgtctcttcctcttcttgtaagaacactatcagattaggttcccacacttacaactttcatttaagcttaatatctccttaaaggtcctatctccaaatccagttccatcagtcattagggctttaacatgaaatacgggtagacacatttcagggtacaataatgtgaaaagataattatcctcgctgataggaataaaatataaattaaacctacaatttttacctagtaaaagtttaatgtgaactagattttttcagatgtaaggccaggtgtggtgactcatgcctgtaatcccagcactttgggaggccaagtgggcagatcatttgaggtcaggagttcgagaccaacctggccaacatgatgaacctctgtctatagtaaaaatacaaaaattagccgggagtggtggcatgtacttgtagtctcagctactcaggaggctgaggcaggagaatcacatgaacccaggaagagaggttgcagtgagctgagatcatgccactgcattccagccaccttttttccccaatagtgatatggttcaggtctgtgtacccacccacatctcatgtcaaattgtaatccccagtgttggaggtggggcctggtgggaggtgattggatcatggggtcagatttcctccttggtgctgctttcatgatactgagtgaatgcttgtgagatttggttgtttaaaagtgtggcacgtccccactctgtcttcttcctggtttggccacgaaagacgtgcgtgctttcccttcaccttctgccatgatttaagtttcctgaggcctcccgagccatgcttcctgtcgagccatgagccaattaaatctcttttctttataaattacccagtctcaggtatttatttatagcagcgtgaagaatgaagtaatacaaatggcttttgaggtacatgtggtttttggttatgtggatgaattgtatagtggtaaagtttaagattttaactttcgcggtggctaacgcctgtaatcccagtactttgggaggccgaggcaggtggatcacgagatcaggagattgagaccatcctggctaacatggtgaaaccctgtctctactaaaaatacaaaaaattagccaggcatggtggcgggcacctgtagtcccagctacttgggaggctgaggcaggagaatggtgtgaggcggaggcggagcttgcagtgagtctagatagcaccactgcactccaggcacttgtaacagagcaagactccgtctcaaaaaaaaaaaaaaaaaaaagattttaactttttaagaaactgccaagttagaaaattaaagaaactagaaaagagcaactaaatccaaagcaagcaaaagaaaaacaataaagatcacaatggaaatcaaagaaacagaagacattaagacacatactagaaaatgtctgaaaccaaaaggtagttatttgaaaagataacttgacaagcaaacttgacaagcaaaaaagaacacaaattaccaaaatcagaaatgaaagaagggaaatcactatcaaaaacctacaaaatttaaactttatgctaacaaattaggcaaactagataaaagggaaacatttctggtaagtcataaactatgagaaccaactggaagaaatttcaaaacttgaatagacctataactaaaaaaggactttattaaaattttccatgaagaatagcccataaatagaaatctatgaaatatttaaagaaaaaataataccaatacttcacaaattctttcaggaaacagacaagggaaaggaaacaattctgaggtcatactatgaggccagtattaagcctataccaaaggcagattttaaatatcaaaagaaaggccaggtacagtggctcatgcctgtaatcccagcacgttgggagaccgaggcgggtggatcacgatatcagaagtttgtgaccagcctggccaacatgggaaaaccctgtctctactaaaaatacaaaaattagccgggcgtggtggcttgcaactgtagtctcagctactcaggaggctgaggcagaagaatcgcttgaacccaggaggcggaggttgcagtgagctgagacggtgccactgcactccagcctgggcgacagagactccatctcaaaataaataaataaaataaaataatacaaaaattagctgggtgtggtggcgggtgcctgtaattccagctacatgggaggctaaggcaggagaattccttgaacccaggaggtggaggttgcagtgagccaaaatcacaccactgcactccagcctgggcaacaagagcaagactccgtcttaaaaaaaaaaaaaaagtaaaaataaaataaaataaataaatatcaatagaaaaactgcagaccatgaactacagactctcatgaacacagacacaaaaatcctgaacaaggccgggcgcagtggctcacacttgtaatcccagcactttgcgaggccaaggcaggcaaattgcttgagcccacaagtttgagaccagcctgggacccatggtgaaaccctgtctctacaaaaagtaaaaaactagccaggcatggtggcgtcactgtagtaccagctactcaagaggctgaggtgagagcatcatctgaacccacggaggtcgaggctgcagtgagccacgatcgcgccattgtactctggtcttggcaacagtgtgagaccctgtctcaaaaaagaaaaaagtccttaacaacaacaaaaaacactgaaaaaaagcatctgacagaatcccaaacccattgataagctctcaacatacaaataagttgaaaatatatgatttcaatagacacaaaaaattatttgatacagtcccacatacatgcctgatttaaaacatttgaaatgctaggaatagaactaggaaaataaaggagtttcctcatcctgatgaaaggtattgtatcagtcaggcttgaataagacaagcagagtcaataagagatatatacatactgtatctatatattaagagatttattagaggggattggcttgtgcaattatgggggttggttaagcagtctctataagggtgtatctctctgatgctacagcttaaagtccaggcatggtacctggagtcctagctactcaggagactaagtcaagagggattgcttgagcccaggaggctgaagatgcagtgagctgtggttgtgccactgcattccagcctgggcaacagggtgagaccctgtctctaaaaataataatgaagtaaaaataaataatgtaaatgtttcatgcagaaatgaaaagatactagaaagtaacacaaagctacaggaagaaataaagaacactggtaaagataactacataactatgtatttacataggtaaatacaaaagccagcaatattgtatttttggcatgtattcccgtcttcttcctatatgatttaaaagaaaaatgtagctgggaatggtggctcatcctgtaatctcagcactttggtaggccaaggtggatggatcacttgagctcaggagttccaagaccaacctggagaaactgaaaccctgtctctacaaaaaatacaaaaattagctgggtgtggtagcaggcacctgtcgtcccagctcctcgggaggctgaggcaggagagtcgcttgaacccaggaggcagaggttgcaatgagccgagatcgcaccactgcactccagcccggatgagactcccatctaaaaaaaaaaaaaggtaactgcataaaacagtaattataagtctctgtaaatgggcacacaatgtttaaagatgtaattcctgtcaataataatataaatggggaaggacagagatgtataggaccagaatttttgtaaatattgaagctaagatagtattaattcaaagtagaatatgtgttaactccaaggcaaacactgagaaaatgaatacaaaatttacagaaaataaaataaaggaaccaaaatgatacagtaaaataaattcgggccaggcatggtggcttccgcctgtaagccccttgggaggctgaggcgggcggatcacttgaggtcaggagtttgagaccagcctgaccaacacagaaaaaccctgtctctactaaaaatacaacattagccggccgtggtggcacatgcctgtaatcccagctactcaggaggctgaggcaggagaattgcttgaacctgggaggtggaggttgctgcgagctgaggttgtgccattgcactccagcctgggcaacaagagcgaacaccatctcaaaaaaaaaaaagaaaaaagaaaaaattccattaaacacaaaaggtggcaatattgggagaattaagaaacaaaaagagacatacacaaaacaaattaaaatatggcagaagtcagtcctttacaagcaattaatttaaatgtatattgattaaactctccaattaaaaggcagagattgccagatggattaaaaaaaatgatccaactatatgctgtccataagagactcagtataaatcccaaactgtaaatagtttgaaagtgagaggagtggacaaagattccatgcaaatagttaagcaaaagagaggtagggtggctatgctagtatcaaacaaaatagactttaagtcaaaaatttttacaagggacaaaaaagacacattatatattgataaaacggtcaatgcatcaaaagatataatagttataaacacaaacacaccaaacagccccaaaagaagtgaagcaaacactacaaaaagttgcaggcaaaaaaaaaaagttctacaacagttggagtcttcaaaacttcacattcaataatggatggaacatctacacagaagatcaagaaggaaatagaaaactggaagattatcaactaacaacacctaacatgtacacaacactctaccccaaaacagcaaaatacacatttcctcatttttctcagtatggttaagaatttcccaaatcttcacattttagtttcttattgcttaagaattcctccttcaattcatctctctcctttcctgttttatatgcgcaataaagggaacccaagccacaagttcaataattagaaatctccgctactattcagttttcattggttggaagcgctaccttccacaaaacactagaacatgattcagccaagttccttgctacaataacctgtttctcatttctgagactaaaacattatggccttaaatgtccatatttctaccaacattttgttcatgattgtttctttaacatgaataccgttcatgacaggattctttaaaatggaagctttctctccagtggttctattttttttttttgtcctccccagaatcatttttacatccatatttctagcatctaccctcagcattcttctagcctatttgcccaccacccagttccaaagcttggacttgcacatttttagttttttgttatagcagcaccccacttctcagtaccaacaactgtcttagtttgcttagggtgttgtaagaaaatgccatagactgtgaggcttaaatacagatatttattttctcactgttctaattaaaatagggattagcaggtttaattcctggtaagggctctcttggcttctccttgtgtcctcatgtggactttcctttgtgtgtgagcataggaagagacgtctctccttcctcttctcataagatcaccatttgtatcaaattagaatcacattcttatgtcctcattgccctatgtccaaatacaatcacattgcaggttaaggggtgaattctggcaagttggagttggggtggggggtggcgcaggggttatataactccagaaatctcagtcacagactctttacctgtccctaacatacatatattagttgccattaaattgaattccttcaaggacatataaaatttaatggtgcaggacagcagaaaacaggatgagactgcaatatcctatcctattgaatatgagaataaagctcctatgcaggcttagagaaaagtcagaaagaataaaggggcaaatgaaaatggaaagaatggtgaagttttatgtttttgagtaaaaatagtaaaaaccaaacagtaataccaccaataataattatattatggtttcgagtaagtgtgaaatgccataagttcattacgaagttaagtgaaaaatgttaatatgataaaaatatagctgtaactacaaacaaggaaaacataataaggacacattttattcattaatttattatttgttaatgacttcaaaaagtaaaagccaagacacaaggatattttgtttctctcactaattttaatgtctgtatacaaggtttagatatttagttttaatttgtttaagctggaaggaaaaaaacacacacaaagaaatataggacaagttctcctggagaactatacccaaaagaggaacattagcactgatggtaactcaggataaaaagggagaatgagatccaagagtaaattagctgtgttgttacataaatagaatttagttagaaatagagctactactctatttcaaagatatgaaatagcaaatatcctgacaaaaaggttaacatactcttgttcttactgtgtaggacatgaaacaacaaccaattacatatcttttaaaactacttgaataagcaatacttacataaaacatagctcaatatatcagatgagaaaatggcttaatactggtaatcattcacaccgttatagagtacataaattctgggaaagacatcagtttcaaaaattaaaatgtaatgaatgacagtgacataaatttatctgaaaataatagtaaaattttcttataaaaatcaaataaccggacaggcgtggtggctcatgcctgtaatcccagcactttgggaggccgaggcagggggatcacaaggtcaggaaatcgagactgtcttggccaacgtggtgaaactccatatctactaaaatacaattagctgggcatggtggcgcatgcctgtaatcccagctacttggcaggctgaggcaggggaatcgcttgaacctgggaggtggaggttgcagtgatctgagatgacaccactgcactccggcctggtgacagagcaaggctctat[131 bp omitted]gagatatcccgtctctactaaaaatataaaattagccggtcatggtggcgcatgcctgtaatcccagctaatcaggaggctgagcaggagaatagcctgaacctgggaggcagaggttgaggtgagccaagactgcgccactgcactccagcctaggcaacaagagcaaaactctgtctaaaaaaaaagaaaaaaaatccaataaccagtggctcgtgatctcattgactgcataaccaagtcagcagtcctaagagagagatgattttggagttaaatgagattagttaaaccaaagaaggtctgctgattgttgaaatgcccaaacctagtaagtcaactctgagagggaataaaaagaaaaataatgataatagattaaaaaaacaattgaagccatgttaatatatagttgtaaattctcttaatgtaagttcagtggtcattttttctccccttttaaaggtgtttgacaaattttagagtgatactttaagagaatgataaattttaagagacttactgggtgagtagttttatcaaatatttaaaagagttctcttcatttggatcctggttggtatagcctgcaggtaaaaagactgcttaaaggaactggttatattccaatataacacacatacacactatatatatatagtgcccagtatatagtgtatatactatatatacatatattgtgtgtgtgtgtgtgtatatatatatatatatatagtgtgttatgtagtgcatgtgtgggcatatatagtatacatcacacacatatacatcacacactatatacacacatatagtatatgtgatatgtatagtatacatcacacatacactatatacactatatgtgtatatacactatatgtatatagtgtgtgtgtgtgtgtgtgtgtgttatggtggaatataaccagttcctatgtatgtgtttttttggggggaatatgttgtatcaaaataaagtagaaatttaaagagaagtcaacaattggatgaaaatggaaaggagatcacacttctatcatttaaaacaaaacaaaacaacattacacaaaatgatgagctgtaagactgtaaaaatacattgtatctgactaggagtgctaactctgtggaggaaaataagtaagtatagatatcacaagcaaagaattacaatgcagaaaagatattgaagtaatattacaattaaaaaactgaatagtcaaaagagcaataatacaaacatcaaaagctattgtaaacaaaacatgccaggatgagaaactcatgaaaaaaactttttaacataaaaaggagaaatatttggcaacatctaacaaagctataagtatatatcagctatgactaagcaattctacgtctacatacagaatgaccatgaagtctaaaaacagactttaagagagggagatactgaattgccttgattacctattaaatccatccacagtattttcctgtgaaaatcagaaataaaaaaccactttatacatttatttcagtcaaatgatttctcaccagtgtaaattttcggttggcaagtaagatgcccaacaacactaaaggaattcccacactccttacattcatagggtttatcatcagtatgaatgcgctgatgtttggtaaaggatgaactatgtctaaaggccttcccacatgccttgcattcatagggtttttctccagtatgaattctctgatgttctgtaagggctgaactatgtctaaaggccttcccacataccttacattcataaggtttctcaccactatgaattctttgatgttgaataagggctgacgtaagtctaaagaactttccacactccttacattcataaggtttttgaccactgtgaattctttcatgtcgagtaagttcactacctactccaaatgctttctcacattctttacatttatagggtttttcaccagtatgaatcctctgatgtctagtcagggatgaactatttctaaagacctttccacatgctttgcattcatagggtttcttaccagtatgaattctctgatgacgagcaagttctctacatactccaaaagccttcccacattccttacatgcataaggtttctcaccagtgtgaattctctgatgttcaatgagctgtgaactaattctaaaaaccttctcacagtgcatacatttgtagggtttctcaccagtatgaattctctgatgttcggtaagctgtgaatgaaatctgaagtccttgccacattccatacatttgtaagttttctcatcagtatggattttctgatgtcgagtaagttgtgcatgcactctaaaggatttcccacagaatgagcattcaaagtgtttctcaccatcatgaactctttgaagtggagtaacttttccaactctttcaaaggtccttctgtattccttacatttatagaacttctcattatgaattttctggtatacattaaagtctttataaaaactacatgtattcccatattccatatatttacaaggtttcacaccagtatgaatattcagttgtaacatactggagttatctatcccaaaggttttccaacattgattacattcatagttttttccaccagtatgtattttctgatattcatcaaactctaagtcacaactgaagaccttctcatattccttgtattcatagggcttctcactgtcatgagttctccgaggtaaagtaagagattcatgagttttgtaactgggcacattttcagagatgattttcatttgactgaaatatcccacttcaggtccttgtaagtcaatcttgcttttgctttgccagtcatttctgaaaatggaaccttcaaggccacataacttgctactttccattacctcccactgagaaccagtgttttgaataatatcttttcctacagataaatgcttagtctcattcctggactccaaatctgaaagaaaggaaaaaataattttcatgtactacaaaaataaaacagttatagaaagaagagacaatttaagaataattcaccatatacatgaattggttaaaatactgtcatgaaagataaagagagctcacagagtaacagcagaacataaagattatgaggattgtgataaaggtaacagattaagtcagtggatctgaaatttgtgtgttggtcatcacctggtaagctcattggttaaacagaatcaaaatctgtagatgtagaactagtcattagcatcttgtagaggtaatgctaacgcagatcaaaatttgataatccatatatactaacacttttgtggttttcctccccaaaaataaattttaccgaggataataacaaggtgcagtttgttaagacctcattttgcctgggcgtgttggctcatgcctgtaatcctagcactctgggagggcaaggtgggtgggttacctgagctcagaactttgtgaccagtgaaaccctgcctctactaaaatacaaacagctgggcgtgatggcatgcgcctgtagtcccagctacttgggaggctgaggcacaagaattgcttgaacccaggaggtggaggctgcagggagctgagattgcaccactgcactctagcctgggcagcagagcgagagtccgtctcaaaaaaaaccacctcattttaacgcattctcctaatcatttttcatctcctagatcaaaacaaatttcctatcatttagagctatccacaggacatttcatttcacatcaatggtctctttgtatgccagcttcttttctttgttaaagtctcaagataccctcagaaagggcatattagttgaccctaaataacttcatttctgtttctaatcccatatctagtgccttaccctcatatatatttttttcagttgtgtattcaatacttttctcttacaccatttacttccttattccttaaattccacaaggacaaatgtaataaattttcatgtgccaatgtataacaagacctaaggacatagtatatgataattaattagaggaaaagtaaatcactgtatgaatgaatctaaataaaaataaaagtatatatacaaagataagtcactagaaaacaataattatcaaaataattatgtaactataagaataatgccagttaccaatgcctcccaaccctcacattgtattagtgattacatatgtatatttataatacagtaagatacataaatatggcgaacattcatatgtatttattttccaactgcttctccacctacacatattgtccaccactattgcttattccctcttatgcagagccatgattgacatgtggaatgaagaaatacaatcgggatgtgttatttacttctcttcaacagcatatttacatttactccgccgtcctcctaaaaccttcctctattttttcttttatcttcttttacagatattcctttccattttcttatagcaaaagtcaactaatgctgtactttccaaaaatatatttcagatattaaaataatatctgaatataattataactactgttagacttacacagttctgagcaagggcttatgtgtgaaaaggagaatatgctaacagaatcatatgaagaaggtggtctaggtagacaagattggaaggcactttgtagcaaaggattttatggagatcatctggaggccaacagtgagagaagggaatgcctgaggaaaactcagagcaacacataaacactgcatgataaagggcaagaataattttctgtgacttaattatgtataagatgaaataatgcaggcatcaatatctgacgacaacattaaaaccagatttgagtgccagtatcagtaaatcaaaagaagtttcagttagaaataaagaagctctctactaggctgggtgcagtggctgtaacatctgtaatcccagcattttgagaggccaaggtgtgcggatcacttgaggtcagtagtttgagaacagcctggccaacatggcgaaaccccgtctgtactaaaaatacaaaaaaacttagctaggcacggtggcacatgcctgtaatcccagctacttgggaggctgaggcaggagaatcgctcaaacctgggagacggaggttgcagtgagctgagactgcgccaccacactccaggctgggcaacagagtgagactacgtcttaaaaaaaaaagaagctcactattaaataactgttgagtcaatgtggaaatgtaactgaaatcacaaagtttgtagagaaccatgatgttgaaaacatttctaactgacatctatggaacgcaaatacatttgtctcataaaaagtaaaaacttaaatgcttttttttaaaaaagtaaaaataaccaatgtataaagaacagtgacctaaagaaaaggtgaggaattagcaaacaatcactaggtgatgaaaacatacacaaaatgttattaagactcctatgctaataaagctgaaaatgtagactaatgaatgaatttcttggtaaaggaatatttaaaaccaacccaaaaagcaacaatagttggaaaaaaacaaattcctggaatgagataaaatgttcactcactccatgaaacagaaaaatcataaccatgacttattgtccttgttattgaaataaaccagataataagccaggaatcctagaacaaagacctgaatcatgatctggaccaggggaggtatgagatgtaacctgtaatgttttgccagaaagaaaaaagttttacaacagtgggtcacatcaaagggacacaaaaatagtttgcgggagctaaagtgccaccattttgacaatacaagagtcaaatgaggggaaaaaagtttatgtactgaaacatgctaaactaaacaaaaccagaaaaatgcactcatatccaattcaatgctgggtctgggatagggagggtatggaatgagccttggataagctttggacaaaaagtgagaataaattcaaaggttaaaggataaagccaaagcacacagaaatcaccataagaaacatggtatcagtatatcaaaatttcatccaatattcatacagctggacatcaaaaatcagactctggtgggctaatgtatactgaaccaataaaatcaataaacataatgagacttaatagaaggtatgaaaatttctagtgcaccatttgaggtggctacttacttacagtaatataaaagacatataataaaaaaagcctctttgcctttcctactagaattacaaaagtttaccaaagaacatgacagcaactaatatataaaaggaatgacaaattgaaacacactgattccaatgaggacttccaattgcaaaaacattaggtgaaccactgaaaaggaactgtgtatctataaaatgccaaattaagaccacagagattggtttctgaccacactgtctgaattagctctttctccatcacacaccatccctttattcttatacatatcactatatatgttctctacttatctgtttacttgtttattatacatctcaagaactagtatgtcaattccatgagagcagggtctgtattggtcttggtcaccattgtaccgatatctgtctcaatgtagacctgaataaatattgagaatatgaatgagcattttttttggtcaatatatacatacataagtctaaatacaagatgaactggaaaacagttggtggcactgaagatcttaatttcctccaagtgccaggcttttgtttctttttttaaaacaaacaaacaaaacacagtctgggctgggtgcagtggcttacacctgtaatcccaccactttgggaggccaaggcgggcagatcacgaggtcaggagattgagactatcctggctaacacggtgataccccatctctactaaaaatacaaaaaattagccgggcgtggtggcatgcgcctgtagtcccagctactcgggaggctgagacagaatggcatgaacccaggagacagaggttgcagcaagctgaaattgtgccactgcactccagcctgggtgacagagcgagactgtctcaaaaaaatcaataaataaaatcaacaacaacaacaacaacaacatcaaagtaaaaacccacaggcttttgaagggattttcccaacagaatcacaggggctaatctccctcctggaccagataggctttgtgctttggcaatgactttctatcactgattggccatcactcacctggccctgtcttctttcacatcccataaactctatagagcaacttcccttcctccagtaaggtgatcccaattggattagaaatggaagactgcttacaacaaagaaatgtaacaatgttttttttattatagccaatttttaaaatacagctttgagaattggctaaagttttactaaataaaatcaaaattatattgataaagatgtcagaaaagagaaatgtgagggaactggaaaaacattcaccttagagtaaccacagaattatcaagtataaagagactagacaggtaaagaaagctcttatgttatttaaacccatactaattctttgtctggagaagcagtataatagttaaaaaatactgtctttggtgccagattgcctgggtggaaagcctacctctgcaattaagtggctgtgtagccttgcagaagtacctaaatactctctgttgtaagcaacctcttctgtacaacaataatagaaatagcacttatatcacagagttattgtaagaattaaacaagtcctttttttatgagatggagtcttgccctgttgcccaggctggagtgcagtggcgcaatcttggctcactgcaacctctacctcccgagttcaagcgggttccagcaattctcctgcctcagcctcctgagtagctgggactacaggcacatgccaccatgcccagctgatttttttatattttagtagagatggggtttcaccgtgttgcccaggttggtcgcgaactcctgagctcaggcaatccacccaccacctcggcctcccaaagtgctgggattacaggcatgagccaccacgcccagccaagagtcaattatgtaaagtgcttaggatggggccaagtagaaggcaagaactatggaagctgagaggaaagttagtaactttctgagctattaaaaggtccttggtggaatactaatttaatgttaaatgtaaagttctttagccataaagcaggtgggaggaaatgaatatgaactctttatcaatccatcaatatataaattgtagagattcttttaacgattataacaaatcaggacacacagtatgttaaaagttctcccagaaggcaggtaagaatataaagtatttatagcaattctgacctcaaacacaatgtacaggttgtacatgccgaatctacaatctgaaattcagctacaaaatcctaaactttttgagcactgacatgatgctacaagtgaaatacacataactacttaacacaaactttgtttcatgcacaaaactattaaaaacattgtataaaattactttcagtctatgtgtataaagtgtacatgaaacataaatgaattttgtgtttcaatttgggttccatccctaagatgtctcattatgtataagcagatattccaaaatctgaaaaaaaatcccaaatccaaaacactctcatcccaagtattttggataagggatactcaacctgtaatgtctcaatgatatgctatatgtgtcccataagtcaaatccagctccttggtatcaaagaaggtagaaattatatgaagggcctaagaaggtaagaatatcatgaagaatgttaaagactaatggagatgtcatttgcaacacaacaatactgaaagcatgcctttgaaatcagttcacctagtttcttaaaacatagccttgaggacggcgcagtggctcacacctgtaatcccagcactttgggaggccaaggtgggcgaatcacaaggtcaggagttcaagaccagcctggccaacatggtgaaaccctgtctctactaaaaatacaaaaaattagatgggcatagtggcgggctcctgtaattccagctactctggaggctgaggcagaagaatcacttgaacccgggaggcagaggttgcagtgagccaagatcatgtcactgcactccaacctgggtgacagagtgagactccatctcataaacaaaacaaaacatagccttgagttcactgaatatcagttgatagtctagagagtatattctaagttatttaaggcagataaatttacccagtgagagtaagttgctgtagttctccatcatcacatcccagtacaagttcctctgagcagaatccagatattcccattcctcctgagagaagttgatgaccacatccctgagtgtcaccagttcctgaaacaacaaacccgtacattacaggtaaaatttaaggaaatatttttgagaaaaagacaagaggaattgccttatagcaaggggattggacagtaaacaaggaggccaaaagaagactgtgacatgggaagtaaggaaattagtgcttccaaaccagactatcatctttcaagactccctttgatccactgaaatctttctgcatacttatgggatctcttatttagccaaccatgtctggaaattaataaccagtttacaaattaaaagaagtactatatacaagcacatttcatgctatgtgcctgcctcatgaatcatcaataaaggtaagtttctataccgtcattcccctgtacaggagaaaaatatctaactttgaaaatggggtatgaataaaattaaagatttcttgtagctccaagttcattactatgtgacatattatttcacattatataataacaattattacttccagcgataaagttttttttttttttttgagacggagtctcgctctgtcgcccaggccggactgcggactgcagtggcgcaatctcggctcactgcaagctccgcttcccgggttcacgccattctcctgcctcagcctccccagtagctgggactacaggcgcccgccaccgcgcccggctaattttttgtattttttttagtagagacggggtttcacct[140 bp omitted]gttttcttgttaaaaatataatagccttaattatattccaacgtttaggttagagaaggtcttctccaatgctgcgtctacaatcatcatcattttgtatgacttgaggccattcaacatcaaatcaatctacctggaaactcaagtctgtggagaaggtcagagtatgcccaattatcaaacagatccatctgctttttccctatccaagaatatgacaaggaaaagtctagggattcaacttttgctttatatctgctcttgacaaaggactgaacacataggagtgttgaacattctttggggaatagaggcacacaggagggacactgtgctgttagactccagcccttactagaaagcgaagaagtatggggttgtggtacaggttctttgacagaggtgtttggtaggaagaatcagaaaaaggaaatatcacaaagaaaagagaagtagttaacttacatggtccatggttagaactgtaaagaattggtcagggaattccacttctggcatgacagcatgaggagctccatggacatgatccccaatgaaactgtaaaaattattttttaagaaagaaccaccattaaaagtctctggaaatggtgctaggaatgtacagcaaatgaagaaacattagtttaagagaatctcaaaaaacatgttaagaactcttagagtctagactccgtgaaccaaacctgagccctccattgtccattctatcttggtgagaaagactccactccagacaggatagccaagggcatggggcttcttcaccacttctcaacccttgccccagtcagatagctatcttcctaggtggggtaagacatcatcacttttcactctgccccagttacctgttgcgcagctgaagaatgaggactcccttcctctgcctagccccaaaacatgaaatgtaggctttaacttggatgtggtactgctgagcatactgaggtttccaactgttgtgtcctggctcccggggcaagtgttccatgcccaaacaggcaagccaggcagacctggctgctgccccatctgccatctaccaagcactcagctcctaaagcaggggaatcactcagagagatgcacgccattgtccctacctccagcactagaatggtggctctgagattttgtccagggggagaagcaggccatagaacagagagttctgtattgctcctcaaaggaactgaattgacttgcaacagaatgtggagaagtttaaacctaagggcaatgtcaaaaactgaaaattttggtgaagggcaattgagaggaggttgattagagatgtatattatactgtagggtggcttgtttgccagacagaaactgagagacacctgggaagacattctattgtcagaacaaatctcgaacactgacctcaaaaaagccccagtttgattacattagcctgtgaagcaatgtatactccagggcacttatgaaagcaatactgccataagttgcaattagtggtgcttaacagctgggggtggtcagggagatgctcaaagacagccctgtcaaaaccactatcatctaacgctgtctgtaaaagtaggcaaggctgtactcccaatgagcaacatcagagattttacaacatggtgggaatagacttcactaaaataatccagagagtccattctcatgctgctataaggatatacccaagactaggtaatttacaaaggaaagaggcttaattgactcacagttctgcatggctggggaggcctcaggaaacttacaatcatggcagacggcacctcttcacagggtggtaggagacagaatgagagccgagctaagggggaagccccttataaaaccatcagctcctgtgagaactcacccactattacaagaacagtatgggggaaaccacccccatgattcaattatctccacctggtcctgcccttgacatgtggggattattacaattcaaggtgagttttgggtggagatacaagagccaaaccatattacagtcactaagcaggtaaataagcaagtaccaataacaagccctgaggcagagggtgtggacaaaagtactggagttccaacaattgtctataatgtccactttccacaaacaagagacaggcaaagaaacaggaaagtatgattcacacactggaaaagaagcccacaacagaaactgcttgtgagagcaaccagatttaacaggcaaagacttcaaattatacattataatacatattcaggtagacaaaggaaaccataaagaagtaaatgtaggtatgatcataatgttgcatcaaaaagagaatatcaacagagataaaaattattaaaaataaacatatggaaattcttaagttacaaagtataataactgaaatgaaattttcactagaaggactcaatagtagacatgaactggcagaagtattaacaaagttgaagacagattaatagcaatggtataatctgatgaacagagagaaaacaagacaaattaacatctcagagaaatgtgggaccccattaaccacactgatataaacaggagtaccagaagagaggtgagagagaaaaaaaaggatttaaaatttacaaagaaataatggatttgaaattcccaaatttattgaaaaacattaaactgcacatccaggaagctcaacaaacaccaagcaggataaatgcatagagatccaaacatagatgcatcattataaaagcactgaaatccaaagaaagaaatggagaaaatcttgaaagcagtaaaaggaaactgcaggctagaagtgaaactaatacaaaagtattaactgctgatttctcatcagaaaaaaatgaaggccagaaggcagtgggatgatatatacaaagtactcacacacacaaaatccttcaacccagaatcctaaatccatcaacacataaaaaaatgaagtgaccccctacctcacaccacttacaaaaattaactcaaaatggattaaagtcttaaatataaggcctgaaactataaaaatcctagaagaaaacatagtaaagctcttgacattggtcttgcaatgattttttaaaatataacaccaaaagcaccggaaacaaaagcaaaaacaaagaaatgggaccaaataaaattaaaaagcttctacgaaagaaaggaaacaatttaaaaagtgaaatgacattctacagcatgggagaaaatatgtgcaaattatatatctgacaaggggttaatatctaaatatataagaaattcattcaactcaatagcaaaaaaaaaaatccaattaaaaaaataagcaaagaacctgatagacatttttgcaaagaagatatacaaatggtcaacaggtatataaaaaggtgctcaatatcactaaacatcagggaaatgcaaatcaaaaccacaatgaaatatcacctcacacctgataggactgctgttatcaaaaagacaagaaagaaaaaaaatgttgacaaggatatggaaaaaagggaagccttgtacactgtcagggatgtaaattggtacagtccttctgaaaaagaatatagaggctcctcaaaaacttaaaaataggacaaccatacaatccagcaattctgcttctggctatacagccaaaagaaatgaagtcaataactcttttccccctgcaccaagatggagtcttgctctttcacccacggtggagtgcagtgccacaatctcggttcactgcaacctccacctcccgggttcaagcaattctcctgtctcagcctcctgagtagctgggattacaggcatgtggcaccatgcccagctaagttctgtatttttaatagagacggggtttcaccatgttggccaggctggtctcaaactcctgagctcgtgatccacccaccttggcctcccgaagtgccggaattacaggcgtgagccaccacacatggccaagtcagtaacttgaagagatatttgcagtccttttcatggctgcattattcataataaccaaggtatggaaacctaagtgtccatcaatggatggacagataaaagtgtgtttgtatgtgtgtgtatacatatatgtatgtgtcaattatatatcagtaaaacagaggggggtggttatccttatgcagcaaacctatatttcaaaacttaagaacatttcaaaacttaagatgaaaagacatttccagataaaaactgaatttattgctagctgactgaccttaaaaagtactcaaggaagctctttaggctgaaaacaggtgatcccaggcagtaatacaaatccataagaaaaaacaaagagaagtggcctggtgcgttggttcacacctgtaattccagcactttgagaggctgaggcgggaggatcccctgaggttgggagttcgagaccagcctgatcaacgtggaaaaacctggtctctactgaaataaaaaattagccgggtgtggtgatgcatgcctgtaatcccagttactcgggaggctgaggcagaacaatcacatgaacccaggaggcagaggttgcggtgagccgagatcacgccattgtactccagcctgggcaacaagagcgaaactccgtctcaaaaaaaaaaaaaaaaaaaaaaaagagaagcaagccagttttatgtaattataaaagacagtatacatatatatctcttctcctcttaactgatatacaaattttatgaaacgtgtacttatgtatttattgggcccataacatacagaaatgtaatatatttgctaataataacacaaggcaggggaaagcaaagttgtactgggctaaggaaatgaatccagatggtaactcgaatccatctggaccaaatgaggagaacccaaagtgagaaatcagattgataaaataaaagttataaatgtataaaggttctcctttcttctcatttttttttaaaaacatagacttatataaggtaaaaattacaacaacgattggttgagtttgaaacatctgtagatataatgtgaagaccaatattactataagagaagatgaaaggaaataagagttatataggagtaaatttctctatctcacttgaattaagccaatataaatcagaagctgtttctgaagtaagatatttggcagaataaatctctaagcagcaaagtgttcagggtgctgctcggcttctcttaactactcagagtaaaatgtgagaagaaacaatacaaagatgggatttataacacggaagcaaaatatagagatttgaaaattctcagcctaagcatgtaaataaaaaggtatttaggaaagtaaaccaagggtgtgaccaagtgactttctgatcagagtgtggctagaaagaagccaggtgttttcatcatgacaataggagaatgaacccaatggcacttcagagagcttcaaggctgctcctcccatcacaggcccacagtgcgagggccttgaaggcaggatggtttccagggaagggcgtagaacactcatggaactttggggcttgctgcccggggctgcctcaagtctctgctccccacatcccggcacagtgctccttggctgccgtagttgtggctccagtgggcccaggtgcagtttagtccctgctctggagggcaaagtggtgaacctcagcatccacatggtactgattttgcaagtgtgcagagtgcacaagatgtggaagcatggcatccttcaaagagatttctttttttttttttttttgagacagactctcactgtattgcccaagctggagtgcagtggtgcgatcttggctcactgcaacctccgcctccccggctcaagcaattcttttgtctcagcctcccaaatagctgggattacaggcacgtgatgccttggagagcctcagggcctagacagagacctactacagaggcagagccactgcagacagtcccccctagggcattgtccagtggagtcatacaggctgtgccactccccaaaccctagacctgtagagccagcagcatgcaacatgggcctgggagagagccagtggcacctgactgcaacctatgagagctgcagtatgaactgtgcacaccaaagccatggtggcagggacccttcgggcctttggggtccaacccccatcccagtgtgtctggaacatgcgacaaggagtcaaagatgattattctccaggctaaaggtttattgttgtttgccctgttcagttttggacctacttgagaccagtgacccatactttcttatttatctgttttggaatagaaatgtctgtcctggccgggtgcagtggctcatgcctataatcccagcactctgggaggccaaggcaggtggatcatctgaggtggggagttcaagaccagcctgaccaacatggagaaaccccatctctactaaaaatacaaaaaaattagccaggaatggtggtgcatgcctgtaatcccagctactcgggaggctgaggtaggagaatcgcttgaacctgggaggcggaggttgcggtgagccgagatcgcaccattgcactgcagcccaggggaaaaaaaaaaagaaatgtctgccttattccattattattccattgtagcttggaagcacgtaactagtttggtttcacaggtacaggactagagagcaatttgcctcaggatgaatcacatgatttagataatacctagatgagactctgccctttaagttgactttaaagtttatgctgaaatgagttttaatactttgggggctattggagtgaaatgaatgtattttgtacatgagaaagacatgaatatagggggggtccaggggcagaatgtaacatgtcctctccaaaattcaggtgttgccaatgtgatagtattagaaggtggagcctggccgggcgcggtggctcatgcctgtaatcctagcactttgggaggccgaggtgggcggatcacgaggtcaggaaatcgagaccatcctggctaacagggtgaaaccccgtctctactaaaaaactacaaaaaaatagccgggcgtggtggcaggtgcctgtagtcccagctactcaggaggctgaggcaggagaatggcaggaacctgggaggcggagcttgcagtgagctgagattgtgccctccagcctgggcgacagagcaacactctgtctccagaaaaaaaaaaaaaaaaagaaggtggagcctttaagaggtgatgaggggctcctccctttgtgaatgggattacagccttcataaaagaggctcaatgcagacttccttgtcctcccttttgcacgtgaggacacacgtcctttctggaggatgcagcatcaaggcacccttggaagaggacatttgaacctgatgatgccttgatcttggacttcataaactacagaactgtgatacatttctgttctttataaatcaggtat[139 bp omitted]acagtgaaaccctgtctatactaaaaatacaccaaaaattagccaggcatggtggtgtgcgcctctaatcctagctactcgggaggctgaggcaggaaaatcgcgtgaacccaggaggcggaggttgcagtaagccgagatcacaccacagcactccagcctgggcaacagaatgagattgtgtctcaaaaaaaaaaaaaagttgtctatgggtgactcagctgcaaagctgcaaggagattgagagtaagacgatggaaaaaacggtcaagccgagaaccaaatcaggaacacaatcccatttacaattgccactaaaagaataacatacctaagaatacagctaaccagggaggtgaaagatctctacaatgagaaccacaaaacactgctcaaagaaatcagatgacacaaatggaaaaacatggtaggaagaatcaatatcattaaaatggccatactgcccaaggcaatttatagattcaatgctattcctatcaaactaccaaggacattcttcacagaactagaaaaagctattttaaaattcacatggaaccaaaaaagggtctgaatagccaaggtaatcctaagcaaaaagaacaatgctggttacatcacactacctgacttcaagctatactacaaggctacagtaaccaaaacgcaatggtttggaaacagacacacagaccaatggaatagaatagaggacctagaaagtcacacacctacaaccaactgatctttgacaaagtcaacaaaaataagcaatgaggaaaggactccctattcaataaatggtgctgggatgactggcatatgcagaagaatgaaactgcacccgtacttttcaacatatacaaaaattaactcaagtttgatgaaagcttaaatgtaagaactaaaactaaaaatcctagaagaaaacctaggaaatacccttgtaaacatcagccttgacaaataatttgtgactaattcctcaaaagcaactgaaacaaaacaaaaattgacaagtgagacctaactaaagagcttccgctcagcaaaagaaattatcaacagagtaaacaacaacctacagaatgggagaaaatattcacaaactatgcatttaacaaaggtctaatatccagaatctacaaggaatttaaacaattcaacaagcagaaaacagtcccactaaaagtgggtaaaggatatgaacagacccttctcaaaagacatacaagcagccaacaaacatacttttttaaatgccccacaccactaatcatcagagaaatgcaaatcaaaaccacaatgagttagccatctcatatcagtcagaacaattattgttaaatagtcaaaagtaacagatgttggtgaggctgcggagaaaagggaatgcttacacactgttggtgggagtgtaaattagtttagccactgtgggatgcagtttggagatttctcaaataactaaaaatagaacaaccatttgactcagcaatcccattattgggtacatacccaaaagaaaataaatcattttacaaaaaagacacatgcactcatgttcatcacagcactattcacaatagcaaagacacagaatcaacctaggtgcccctcaacagtggcttggataaagaaaatgtggtatacatatgtcatggaataccatacataaaaaagaacaaaatcatgtcctttgaagcaacatggatgcagctggaggccattattctaaaagcattaatgcagaaaaagaaaatcaaatactgcatgttctcactgctaagtgggagctaaacactgggtacaaatagacataaatatgggaacaatacacactgcgactactagaggcgggagggagggagagaaacaagagttgaaaaactattgggtactaggttcactatctggaagacaagatcaattgtactccaaatctcagcatcatgcaatatactcatgttaaccaacctgcaaatgtaccccctgaatcgaaaataaaagttgaaaaaagaaaccaaaaacacaatgaaggagaaactaaaacatacccaagtaaacaaaaactgagggacctcattcgaagacatgccataatagaaaagctaagggagccctgcaagttggaataaaaagacagtagaaagtaactcaaagccatatacaaaaatgaagaacaggccgggcgcggtggctcacacctgtaatcccagcattttgggaggccaaggcaggcggatcatgaggtcaggagttcgagacaagcctggccaacatggtgaaaccccatctctactaaaaatacaaaaattagctgggaatggtggcacatgcctataatcccagctacttgggaggctgatgtaggagaattgcttgaccccagaggcggaggttgcagtgagcagagattgtgccaccgctctcatgcctgggcgacagagtgagactctgtctcaaaaaaaagaaagaaaagaaaacaacgataaaggtacctaaataggcaaatacaaaagtctattgcatcttgggcttgcaggtcctctttatttccccaatatgatttaaaagactaacgtgtaaaacagtcattataaaccaatgttaaagagcacacaatgtataaaaatgtaatctgtgacaaaacaacatgaagaggagcagaactgtataggaacagagttttggatatagtattaaagctaaggagtatgcagcacagttttgattcaacaggtctggaattttgtttgtttgagacagggtctcactcttttgccccggctggagtgcagtagtgtctggaatgtttaaaccctgcctattccaaagaaagttgtagcccttgactaacacctagaagataaattctggccccggaatagccagctttcattaattttaatgtgatcctttcactagtgggaaaacaacaacaacaacacttttctgagttgtgtgagtccatctagcagtcagtgaacctgaaagtggtcttggagttccatgaccaaagtctataaattcaaaccagttatttgtaaatgtaaaatattcactgtaatcttcagaacacatgctaagaaaacaatcagcttatataaaagaaatgacaagggaattaaaatggtacagtacaataagttaattaaaaccaaaagaaagccaggtgtagtggctcataccacttatcccaacacttttgggaagctgaggcaggcagatcgcttgagcccaggagttcaagaccagcttggccaacatggtgaaaccttgtctctaccaaaaatacaaaaaattagccaggcatggtggtgctcacctgtggtcctagctgttggggaggtggggggcgggggtgtgtgagggctggggctggggtaggaggatcacttgagcccaggcagttgaggctgcagtgagttgcgattgcaccactgaactccagcctgggtgatggaatgataccttgtctcaaaaaaataataaaaaaaagggccaggcctggtggcttatgcctgtaatcccagcactttgggaggccaagacaggtacatcacctgaggtcgggagtttcagaccagcccggccaatatggtaaaatcccatctctactaaaaatacaaaaattagcctggtgtggtggcaggcacctgtagtctcagctacttgggaggctaaggcaggagaagcgctggaaggaggcagaggttgcagtgagccgagatcgcgccactgcattccagcctgggcaacagagcgagactgtctccaaaaaaaaaaaaaaattcatatgacattgcaacagattcagccaaaacaaagctggaagactgatatttcccaattcagaactgactataaaaccacaataatcaagactgtggggcacggaatatggatagatatattcatcaatggaatagaactgagtgaaaatttaaaccagtgtagctagggtcaagtgatttttgacaagggtgccaatctaatgaaatagaggaaagaacagtcttttcaacaaatggtgccagaaaaattgaatatccacatgcaaaagaatgaaattgcatcactccttaataacacataaaaaaagtaactgaaaacagatcaatgacccaaatataagagctaaaactataaaactcttagaaggaaatgtaggggtaagtcatcatgaacttatatttggcaatggattcttttttttttgagatggagtctcactctgtcacccagagtggggtgcagtggcgccatctcggctcactgcaacctccacctcccaggttcaagtgattctcctgcctcagcctcctcctgagtagctgggattacaggtgcctgccaccatgcctggctaatttttgtatttttagtaggagacggggtttcaccatgctggccaggctggtttcaaactcctgacctcaagtgatccacccatatctgcctcccaaagtgctgggattacagtctgagccactgcatctggcctatatttggcaatggattcttaaatgatgacaccaaaaggataagcagcaaaagaaaattttgatgaattaggatgtatcaaaactaaaagcttttgtgcatcaaaaaatcattatagaagaaactgataagacagcctgcacgatgtgaaaaaatatctgcaaatcatatatctcatgagcatttaacatccagaatatataaaaactcctacaactcagcccaacaaaaagacaaacagcccaagttaaaagctggcaaaagacttcagtagacatttcttcataaaagatgaacaaatggtcaacaagtacatggaaagatgctgaaaatcattagacaataggaaaataataacagaaccatgagaataacatcagcaagatggcagctgaggaagcttcaattccctattctctattgaaacacttaaaaaacaactagagactagctaaaatatctttgtaagggtctggaaatcactcaaagactgtaactatcaaacaaatgcccagtcaggagaaagtcacattcaaaatggtagtgaatttgttgattatgttacttgtgctcttactccatctctagtgcagcatggaagaagcagcccagttcccatttccctccttcaggccagaaggaacaaagcagagcttatttggaacatgctaatctgtctgtgggctccttgaggtactgaggtactggtttctgttttatctgattttctttcttttttttttttttttacacagagtctcactttgtcatctaggctggagtgcagtggcatgatctcggctcactgcaacctctgcctcccaggttcaagcaattctcctgcctcagcctcctgtgcagctgggattacaggtgcacaccaccacgcctggcaaatttttgtacttttaatagagacagggtttcactatgttggccaggctggtctcgaagtcctaacctcaagtgatctgcctgccttggcctcccaaagtgctgggattacaggtgtgagccactctgacttttgagtttcaacatgtaaaaggctgcacagctcagatctcaggcaggtaaaggccacaaaggacagtggtgggcactgtggtgcatcaaagctaaaacactattaaaactagaaataagtgcagcagcactgcaggatataagatcagtatgcaaaactcaatgatattttaattgcctggacacctgtggatacttggagcaaacgattacaggtggaaaaatataacatctagggcctaagaagcaagggtgagaccctatgaaattaaggcatttgaaagcagctatgcatattagggaaactggtaaaagcatatacacaggtataggcacaggcatgctacagacccaggaaaaacgtaagaccttagactttcaccctgagatgatcccaaggccctaattagtgaagatctccaacggtctgcaaaaattaggagaagtagctgtttcttcaaatgcccagttttcaacaaaagactgcaaggcatacaaagacacaggaaaacagggtccaatcaaaggagcaaaataaattacacttgaagaaacaaaagcattggagtaactagaaaaaggctttgtaaaaactgtcttaaatatgctcatagagctaaaggaaaacagagaaagaactaaaaaggaaatcacgaaaatgacatataaataagtgagatatcaacaaagagaaataattactttttaaaaaactggctgggtgtggtggctcatgcctgtaatcccagcacttagagaggctgaggcgggcaaacaacacgaggccaggatttccagactagtctagccaacatggtaaaaccctgtctctactaaaaaaaaaaaaaatttagctgagtgcagtggtgcacacctgtagtcccagctactcaggaggctgaggcatgagaattgcttgagcctgggaggcacagaggttgcagtgagtcaagatcacacaactgcactccagcctgggtgacagggcaagactcttgttgcaaaacaaaaagaaaaagaaaaaaatgaagaattggctcagagtgctcaaaccctgcacattccaaagaagaaattgtccttgaccagctcctgggagataatctctgagcagttagagtatcctgcctgattaacagagtctatgtatatctgaggtcttagccatgccagatggcttttgttaacaatgtggtttatggtaaatacctgtatccatctgacttctgggtaggcttgactaagtaggtaaggtcagtgcacagaaccttcatgcccacatgactgatcgtcaataaaaaccccggacatgggccagggcagtagctcacacctgtaattccaacactttgggaggcagaggcaggtggatcacttaagcccaggagttcaagatcagcttgggcaacatggcaaaaccccatctatacaaataatacaaaaattagccgggtgttgtggtgtgtgcctgtagtcctagctacttgggagactgaggtgggaggatcccttgaggctgggaagtagaggctgcattgagctgtgaccccaccactgcatttcagcctgggtgagagagcaagaccctatctcaaaaaaaaaaaaaaaaaaaaagaaaagaaaaaagaaaaaagaaaacaaagcaaaacaaaaaaccctggaaaccatggcttaggagagcttccctggttggccacgcttcatgtttgtattcgcacattgttgctgggagaattaggtgctgcctgtgcaactgcactggaagcttgcacctggtttctcccggtatttgccctatgcaacttttccctttgctgattttaatgtgtaccttttcattgtaatgaagaataactatgagcataacagcttttctgagttctgtgagtccttctcgcaaatcattgaacctaagacagtcaaattgccttaatagaacatttgcaaatctggcttttaaaaaattcatttcaagtgcccatcaaaattaactttatattttcattgctcttgatttacagaaaatgtatggggaatactaagaatcttcacaaaccagctttttttcttcccttgcagataaggacttaaagtgccaggcctttattaaattctctaggtttatgtccatattaatgtatccaggcctcataaagaccctaaagcactgatataattattgtttacattctacaacaagaaactgtaaagcggaaaaatgagtaactattaacccctttgaaatgcagtgtgaacatataactgaattttaaatttttttcacttttcctaagctaattaacacaggattacctttaattttaattaacttacatttaaatacaaaagcaatataaatgtttttctattaaacacaactttattgttttggtaggactataattcaccctaaacactgaaaatttagcatccaaattgagacatgcaataacaataaaacatataccagattttgaaaacttggtataaagatatgagtgtaaagtatttcagtgtattcatatcattacatgttgaaataatattttggatatattggtttaaataaaatacattaccaaaatt[135 bp omitted]acatgatgaaaccccttctctactaaaaattcaaaaattagccgggcatggtggcgggcgcctgtaatcccagctacttgggaggctgaggcaggagactcacttgaacctgggaggcagaggttgcagtgaactgagatcgcaccattgcgctccagcctgggcaataacagtgaaactctgtctcaaaaaaaaaaaaaaaagtgtctaatggaaatttttaaattacctaagtggctttatattatatttgcattagactgtgctgctttagactcagacaccactgtatcaggctgcctctcacaatctacaccaatgtcacactgccaaatctcaaagaagatttggttgtcaccacttaaatcccctcatgaatgttctggaaaaactccctgcccttgttgacatagcctctctgcataaaactcctatcatattcccactcctaaatgtctccaaagccaactttgtcacttactgattaatacctaccatctcctatcttgctttgtttgcaaatcaagtctgtaaataagatcaaaggtatctagtgtgccattctacttaatcactcgtctcctccttaacaaattacattctaaaaaaaagttttaacttctcctccaggagttgtatttctataccataaaaatcctttggaaaaaaagaagcacatgggagaattgaatgatttacctaatgcatatgtgaatattcaatgaaagggaaatgggcatttggaaaggcaatggaggacaaggggacccatctctacggtcctgttgttaattgggaagagaaaaccaagggaccaggtaaatgaacaaaaaaaaaaactaaccttgagttggccattagtaccaatgctgtcttccacttcagggggccttcacttgcagaactacataaccaagagggagaaaggactcatgacatcctggactggttaaataagaacacagtgttcaccaccagaaaagcccatcacacacaacaaacacacccagatcgaagagggaaactagaatactgtcgactcctccccacatccgagaaaaaggtacgaccaatgcctagcagtttctagggaacacagctcaggaaatactgtagttctttaatgtataaatggcctccaaactcatgcaaggggagttatcccaggaatgaatactacacctatgccctccccttcacgtcttcccaggaaacttcatttatctatcttatctatctatctatctatctatctattatctatcatttatctatcttctatatatcatctatgtaatctatctatatgcgtgtgtgtgtgtgtataagacctcacgaagagattccatcacagacatcacagagtcggaaaaatgacgctttacccaaaacaaactcctacaggctcacggaaaaaaacgaacaaacaaacaaacaaaaaaaaacaaaaaaacacttctaccccgttcacacttatagttggtcacaacagtgctgtcacacgatcacgtcaccgtagaccagggtcacacgatagaccccgcccctactcaccgtcctgagtccgatcaaacagcacccacggcacacactagggtctccgtctctcacacacacacaccacaatgacgtcgtaaacaatagcactaaccaccatcgtccgcagctcccgcgtacagaggcctcaggctcccggctccacgtggaccgacctcgcccggcagcgcggggccacctcaccgcgagctcctcccgcagcccggcccgggtcacctcgactcgccaggcttaactcaataaccacaacaccggaaaaggaagcaaaggtcgaagttcatccgcggccctgaggcctgtgggaaacgtagtccaacaacgaaagagccctgaagctcaagcggagcccgctggccgcaggggccgcaccacgccccagaccctggagtttccgggtgcgcagacccttgccatcagcagaggctgccgctgcgcgtcccctaggcgcggaagaggcggctggtggtccctgacggcaaggtgaagtcgaggcagtaatcgggaacccaggttgggaggacagaatggggaacaggaagctggggcgagggtggtcttgggggaggtggggggccgcggaattctaggtggcccctgcctcacctctggaaagaaccggaagcccgggccggggagggtgaagggagtcgcggacccggctgctcagccgaggaggaaacccggaccccaggctgagggaggccgaagaaggaactggagggccgggctgggaaggcctgaagcgggtacagcctttaggctggggagggtcgaggggagaactcggagcctgagtcgggcgaggttttgctccactctggcttctaagtgtgggggcctcaggatgtgacccgtggtcgtaaacctgagggtgacttggagtttttgtccgttttgcaccatgagaaaggccccagatggaatctggcaggtagcggcggttcagtgtgtgtgtgtctgccttagggcgtgttttacactgttgacgaaaagactcagactctaaagtatttgaagagacttattctgagctaaatatgagtgaccaatggccggtggcccagccctcaggagatcttgagaacctgtgcccagggtggacgggatatatgtggttttataccttttagggaaacatgagacaccaatcaaatacatgtaaaatgtacattgattccctccggaaaggcgggacagctggaaggtggctggccttccaggtcataggtagattcaaagattatttgattggcaatgggttgaaagagttattgacgtaagacttaggaatgtctccaggtagcacgcttcacagagaatagattgtaaatgtttcttttcagacttggggtcttttctatcagtaattccaaaatggaggagggtataatgaagcatgtccgacccgcccacccccgcctttccatcatggctttactagtttttcaggttaggaatgccctggccaagaggaggggtccattcaagatggtctgggtgtgcttaggattttatttttggtttacaacaccagcaccaccggagtttgctggtgtcctttccagtcagtttcaaagcagagacagccatagttctgatttgtgtcactgtaactgtcagttccggaattccatatttctcctttagtttaccctaatgtgtgtgagatttcatgtgtagttcatttttctttttctgaacagcactccattgtgcaaatataccacaatttgtgtagtcatttttctgttgttgaacatttggcatatttacaggttttatacattacgaataaagctggcacgtttccatttctcctgggcaaatatttagaagaaaagttgctgggtaattggtaagtttacatttaactttccaagaagctgataagccttttagaatgattagttgtgatttgtgtgtgtgagattgtgtaactggagtaagtagtttctgagtttgctttgctatgtttgtatggaattataagatgggctcaacagggttgtgaatgtcatgtaggatccataggattgtggctttgtggagtaggtaagatcacaggaaactgaatgtgtctgtgctaattgttatttatcatggttttgtgtgtacattccatgataactgaaaatggatcactatgtaagtgatgttaatgactgaagaactctgtgtgtctggtgtatttcattttgcttgcagaattatgacagtttctaataactaaaatatcacaagcattggaaactaggaggtaaaattataatttctagatgacagggttgcattacctggaaacatcatacaaactaaatccaatatgttgaaatgaggactccatatgtagcacagaagtaaaatactttcatccctaccactttgaatagttatatagatttgaggtcccctcccacccatccccccgcctcctgcttgcccctggatgaagttgagggtgatttaatgccctcctaaatcactttaagccaagtaaaagtacttgaaatactaaaaatcacaaagtcagctttgtagtaattaaaatagtcattttctaattaaaatatttactgtaaaaatcaaatttcaaacttcatttaaaagaaaaatttctttcaactgtctagagcctacagtgtaattactttcttctctacttccccaaccggtattactaaataggtactatctcgcataatgattaggatttaatagtaaatgcttattagttaaccaggcaggtttaaccacgttattatagaaactctaagaggtttcacatgtgttttttttttgttttgttttgtttgtttgttttgagatggagtctcgctctgtcacccaggtgggagtgcaatggcgtcgtcttggctccctgcgacctctgcctcccgggttcaagcagttatcctgcctcaacctcccaagtagctgggattacaggcacccgccaccacacccggctaatttttgtatttttagtagagatggggtttcacca[136 bp omitted]ccttttgaaaaaaagaatccaaaagagcaagggtcctttcctgcaaattataaaagctatggctgagaatgaatgtttcttctctcctttctgaaatatctttcccccaggataactgagcatttgcctaccatgaaacttccatgagacaggattctccattttcttttattctagtcagataacgatgttgccttctccaagtttcccttctaattgtaactactgttcacttaataattggatattttggccgggcgcggtggctcacgcctgtaatcccaacactttgggaggctgaggcaggtggatcacgaggtcaggagttcaagaccagcctggccaacatagtgaaaccctgtctctactaaaaatacaaaaattatccaggcgtagtggcccgcacctgtagtcccagctactcgggaggctgaggcaggagaattgcttgaacccaggaagcggcgtttgcagtgagccaagatcgtgccattgtactccatcctgggctacaaagcaagactccgtctcaaaataataataataataataataataattggctatatcactcagcactccttttcactcctataaacagaaacatattcccttgaattaaataagcatatgttcctttcataaaccttttttatacagatagtgatttgatgtctatgtagtgagtactcaggagagcccatacaagggaaagcctcatcatgtccacatatctcagtttactagtgagtgattctactttttcttttttcttttttttttttttttgagacagggtctttgtcacccaggctggggggcagtggcacaatcttggctcactgcagcctcgacctcttaggctcaagtgactctcccatttcagtctcctgagtagctgggaccacaggcacccactactatacctggctaatttttgtattttgtattttaggtggagacaaggtttcgccacattgactgggctggtctggaactcctgagctcaagcaaccggccctccttgacctcccaaagtgctaggattacaggtgtgaaccaccgtgcccggccctactttctatcgaagtagaataggtagatcacattattattaacagtatatgggaagagggaggtcctcccatgttacattgttctcccttcaccttctgggtcatgttgcaccactgtttcccttctagtcatatcccagggggccttgtcccatttatacagctctattctagtggtcaccagaggaatgggagtaatctgattgaaagataagacagaagattgtactctcttttttttttttttgagacagagtcacccaggctggaatgcagtggcattgtcatggctcaccgcagtctcaaactcctgggcccaagtgatcctcccactcagcctcctgagtagctgggactagaggcacatgcaaccacatgcagctatttttttttaaattttctgtagagacagggtctcactgtgttgctcagtttgtctcaaactcctgggctcaagtgatcctcctgccttggcctcacaaagtactaggattacaggcatgagtcaccacactcagctgaactctactctttatgttcaggaaagcactggagaagagagaggacaagagaaacaggtccgtagtgacaggagcctaggaatagagcaggccttcagtcttggtgaaaaaataaatggtattctaagccttcctttggacattaattcagtactacccactctttttctcttgtccattcctcccttatattttttttataaaatgaagaactcaatcccttattttttttttctatccttcaagtgaagggcaagaacaaagagtgtgggggagattttttttttttttttttttttgagacggagtcttaactctgtcacccaggctggagtgcagtggtgctatctcggctcactgcaacctccgcctcccaggttcaagcgatcctcctgcctcagcctcccaagtagctgggactacaggcctgcgccaccgcacgcagctaattttttgtatttttagtagagacgaggtttcaacatgttggacaggatggtcttgatctcttttttttttttttttttttttttttttttttgagacggagtctcactctgttgcccaggctggagtgcagtggcgtgatctcagctcactgcaagctccgcctcccgggttcacgctattctcctgcctcagcctcccgagtagctgggactataggtgcccgccacgatgcccggctaattttttgtatttttagtagagatggggtttcaccgtgttagccaggatggtctcgatctcctgaccttgtgatccccccgcctcagcctccaaaagtgctaggattataggcatgagccactgcactccactgggggagaatttttttttttttgagatgaagtgttgctctgttgcccacgctggagtacagtggtgcgatcttggcttactgcaacttctgtctcccgggttcaagcatttctgctgcctcagcctccctggtagctgggattatgccaccacacttggctgatttttgtgtttttagtacagatggtttcgccat[139 bp omitted]ctcatgcctataatcccagcacttggggaggccgaggcgggtggatcacctgctgaggtcaggagttcgagaccagcctggccaacatggtgaaaacctgtctctactaaaaattagccaggcatggtcgtgggtgcctgtaatcccagctactcgggaggctgaggcagagaattgcttgaacccggtaggtggaggttgtagtgagccaagattgcgccgttgcactccagcctgggagacagagtgagactccgtctaaaaaaaaaaaaaatactacacgtgtgaattagaaattctaagctgagaaagctacttaaaattggtcaagaaaaagatacacattaagtataagaaagttggcatggctatagtagtatcagataataggcctcaaaacagtgtatatggcaggagataggtaacagtcataaaagagcaggtcattaggaatttgcatatacatttgtcactacagggatacattctgagaaatgtgttattaggtgattgcatcatgcaagcatcatagagcacactaacacaaacagcaatggggtagcctactacatacctaagttatatggtatagcctattgctcctaggctacaaacctgtatagcatattatatagcatatagcatacctgtattgaatgctgtaggcatttataacacagtggtgtttgtgtatctaaacatagcaaaggtacagtaaaaatactgtataaaatattaaaaaatggcacaccggtataagatacttgccatgaatggagcttgtgggactgaatttctgggtgcatcagtgagtgagttgtgagagaatgctaaggactaggacattactgtatactgctgtagactttacaagcagtacacttaggcttcactaaatttatttttttaagttttcttcaataataaattaaccttagcttcctgtaatatttttacattataaacttactattttttatctttctgaattgtagtgactcttcacttaaaacgcaaacacattatatagcaacacaaaaatatttctgtccttattctataggcttttttctatttaaaaatttttttgttttaaaaatgtttgttactttttaaactttcttgttaaaaacaaacacactttagcctgggcctacacagggtctagagtatcaatatgtctgtcttttaccgccatatcttgtccaactggaatgtcgtcttcaggattaaaaatatgcatggagctgtcatcgcctatgaaaacaatgccttcttctggatacctcctgaaggacttgcctgaggctgttttacagttactttttttttttaataagtagaaggagtacagtctaaaataataatacaaatagtacaataaattacataaactagtaatgtaatcacttattattatcacctattacgtactatacataattgcatgtgctatacttttatacaactggaagcacagtaggtttatttacagcagcgtcaccacaaacacctgagtgatatgttgcatgacaacgtccacaagtgataggaatttttcagctccattgtaatcttatgggaccaccattgtatatgtgtccatcattgagtaaaatgttattacatgacacatgactgtgttcatcaggaatatgtatgctagtatgaacctataatgagagtgttaaattttatgaagcaaaaactaacagaacaaaagaaatagatccacaagcataattggaaatccacaattatatctcagtaattgatagcacttgtaggcaagaaattcagtagtatatgtaatcagctcttcatatatgcagattcaaccaatagcaatgcacaaatattcagaaaaaacacaatgacagtaaaaaaatacaaattttaaaatacagtataaaattatttacatagcatttacattgtattaagtattataaaaaatctagagatggtttaaaatatacagaaggttgtgcataggttatatgcaactactacaccattttatataacaaacttgggcatctgtaggttttggtatccacaaggtgtcctggaaccagtcccctgtggatagcaagggacaactgtatagaagatatgaaccacaccagtcaacatgacctaattgttgtttacagaacaccatacccacaattgaaaaattacattcttttcatgtacctgaacagtccccatgatagactattggctggaccataagtcacaataaacttcaaaagattgccacattacagggaatgtgcattagaaaccaataataagaaacctatacagtccttcaatacatggaaattaaataacacacttctagatctacagatcattgaataaataaggggaaaatgttttgaaatatgaaaaagtgacaacagcatatcaaaattggaaggatacagctaaagcagagttgagaggaatgttaagtacttaaataaaaaaaggagaaattcatagcagcattattcacaataaccaagaaatacgtacaacccagatgttcatcagtggatgaatggataaacaaaatgtggtaatatgatttggatatttgttccctcaaaatctcacacggacatgtgacccccagtgttggaggtggcgcctagtgggaggtgttggattatggggtggatctcatgaatggcttggtgtcctccacatggatatgagttcatcctatagctagttgtttaaaagagcctggcacctcctccctctcccttttgttccctcttgccatgtgatatgctagctctccctttgccttctgccataattgtaagcttcctgaggcctcaccagaagcagatgctggcactatgcttcttgtacagcctatagaaccataagctaaataaaccatttttctttataaattacccagcctcaggtattcctttatagcaacacaaaacagactaatacatgtggcatatacatacaatgtaatattattcagccttggaaggaaattttgacatatgctacaatgtggctgaaccttgaggatattctaataagccaatcacaaaaagataactacttatgattccactcatatgaagtatctagagtagtccacctcataaaatcagaaagtattactggtctcccacttttaggctattaacgcttgtagtgagagtttgtaggtttcttgtcgtggttgccaggggctgggggcagggggaaaagggtagttattatttcatggatatagtttcacatttacaggatgaaaaagttgtggatgttggttgtacaaaaatgggaatatacttaatgctgctgagctgtatactcaaatagttaagatggtaaattttatgttacatgtatactttgccaccatttttaaaaatgaggaaaggcttaaacaagaataataaacatgctatatgc[171 bp omitted]aaaattagccaggagttgtggcaggcgccgcctgtagtcccagctactcgggaggctgaggcaggagaatggcctaaatccgggaggaggagcttgcagtgagccgagatcgcgccactgcactccaggctgggtgacagagcgagactccatcttaaaaaaaaaaaaaaaaaaaagatgagcataaatcaattaagtagaaatagaaagcagaccattaagaaaatgaacaaaacaacaagtttatgtgaaggtattttaaaaatggataaatccctagtaagcataattaataaaatagaaaacacaaattgcccatgtcaggaataaaaatgaagatgccactacggatcctatagacagtaaaatgataaggcaatattatgaacaattttatgccaataaatttgacattttagatgaaattcatccattcctttaaaagcacagcttctcaaaactcttgactcaaaatgaaatagaaaaacagaaagtctgtatctaattgtttgtttgtttgtttgtttggagacagggtcttgctttgtcagactggaggctagtggcatgatcatgactcactacagcctcaacctaccagtatcaagtgattcttctgtctcagcctcccaagtagctgggagtacaggtgggcaccactatggccagctaattaaaaaaaaaatttagagacagggtctcactttgttgtgcaggctggtcttgaactcctgggctcaagaaatcctcccaccttggcctcccaaagtgctgagatttcaggcatgtgccatgacacctggcctaaaattttaagttttaataaataaaaatccatacatacagaaccaggttcagctccactgaaacccctgcaactcagccaaaagtaaatgtaacatggttttgaatgctgtcttaatccagggcacatgaaaaacccttaaaaacaaaaacaaaaacaaagcatacctctgccccaccgagatgagctcaaaaacaaacattacaaacaacgaggaaataaccatcacaggagggtcagcagagtaaataaataataaagttggcacctacaagaactgcatataatatgacaatatgaaagaatatgaaatgttttaaatggaaaaaaactcataatgaaagcataatacttaaaaagaatcagtagatttaaaaaataaccagagaaaatttctagaaataaaaaagatcttaagtatagagaacataacaagcacagctcaaaattaatgaacttaaagatatatctgaagagattacctataatgcagcacagagataaaaagtgaaatacagatgagaaactgagacatggaagaaaataaaagggcccaagacacatctaataaatgtcataaaaggagaaaaaggaggagaagcatcagaagaaaaagtggtttacaacttttcaaaattaaactcaattttaagatgaggaatcaaaatgagtgtcaagtaggataatgaaagtggatctaacacctagacacatcacagtgataatgcaaaacagaaatcttgaaaagaaggaagggagggaaggaaagaaaagaaaaacagaaaagacatgctacctaaaaggaaagatgattgggcacaagatgtcagaagacaggagaataataccttcaaactgatagaggaaaagtagcaattaagagtggggcaaaataaagacattttcagacaaagataaggtttttttcatagactcactggaagaatttctaaaggatgtgaatcagcaaaaagaaaaacccagaaagacagaatgagataaaattttaaatgatgagcaaggaaattggtaaatatgttggggattctgtttactaagtaatgatgattactttttacggaatttcaaaacaaattagatcaaaagcaccagacaaaaatagaaagaggccggatgcggtagttcacacctgtaatcccagcactttgggaggccaagatgggcagatcacttgaggtcaggagttggagaccagcctggccaacatgctgaaaccccattttcactaaaaatacaaaaatcagctgggtgtggtggcgctcacctgtgatcccaactactcaggaggctaaggcaagataatcgcttgaacccaggaggtggtggttgcagtgaaccgagattgccccactgcactccaccctgggtaacagagggagactctgtctcaaaaaaaaaaaaaaagaaagaatgtacctacagcattctaaggtcttttttattgctcaagaaggagataccaattagtcattaagtcaaagatgcaaggttaagagtaacttccgatagtaaagcaatacaatatcttatttttaatccagtgcaggggaaagtagaataaggagcacttaattgatctcatagaagtcaataaaacataaaagaagcagcaagtataagcctgattaaacagaaagtggggaaagagatgggtcattgagctaaggggaggcctggtgacagctcttggaagatgaagtctgaccagaatagcacataagtcaatcaggttgctgtggccaaagtgcatcgtccttgcctctctgagtttgtagtggggagaaacaacaaacccaacactaaacatggaggaaagaattaaagactcaggcctatcagtttccactccctgccctcccgttactaccagtttaaaggcttacaggggctcatggatgagtgggaagtttttgtgacgtttgatagagaaatgagctgcctcttgaccagcagagagccccaggttcatcctcatgtggagtaacagggctgcagagcagtcagtgttccagagccctgtgctcacagatctagctacaatccccacctgcactgtttttagttgtgtatatcccttaatgttactgaacctcattctcttctgatgtaaaatgaagacaggcatttctgctcaacccatttcatctgtaaatggagggaataagtctttatgaaatgagacaaagtatattcagtgtctgcagtgcagttaataaattagtgtctttctacctgtttctcacaaaactgaaataaaagctggaaaattgctttgtaaaccataaggcactctgcatacaaaagagattactatgaatttttcctaagtgattaactcatgactcctttccatactcctcagcagtggcaacattgggaggctggattttggtgggatggaagataatgaggggactctggtttctggccagctccaggactggatgtgatggttaacgatacttaacatcaccacacagctcattccctagctggctcagtaactatggatctctaagcaatgtcttaacatttacgcttacatctgctaagctaagtatgtactgttccttgatttacatgccacattgattttttaaggggtttcaactgtggatcatgaggcagaagaggtgacaatgaaaggtcaggcaaagacaggagtgtccagtgtggaacacgaaatcccatcctgactataaaacattatatgctgtttattacattttaacttcagaaattatcgactccattttccatttccttgcaatatgtattgagcttttcagtcctgttttgtcatcatgcaaacaagtaaaattcttcaggatgcagacccacctaatagtactaaaaaggaatctttaaaaaatatggagatgtcttctccctatggagctacaggggaaaagacaccactctgtgtcataaaatctatttaaatggttgccgggcgcggtggctcacccttgtaatcccagcactttgggaggccgaggcaggtggatcatgaggtcaggagttcaagaccagcctgaccaatatgatgaaaccccgtctctactaaaaacacaaaaattagccgggcgtggtggtgtgcatctctaatcccagctactcgggaggctgaggcgggagaattgcttggagccaggagatggaggctgcagtaagctgagatcatgccattgcactccagcctgggcaacagagcgaaagcgagactccgtctcaaaaaaagaaaaaaaaaaagctatttaaaagaacctgatatgataaagtattgaattgagaacactcagtgaatatcagcattactctcctgttcagtagagagataactctgatcatcctcagctattttcctgtctataatttgcttatttgtattatttgtgcaaagaagtctttaacacctcatatttcaatagtaatcctaaatcctgttgtttatgtcataattcgctgccctgataatgcttaaactcatctctgtttttctaaaagacataaatatgtataaggtttctatattaagaaaaaagacgagtatgctgtttctgtttacttctatcagcataaaggtataataaaatcccatgagtggctgggcgtggtggctcacgccggtaatcccaacactttgggaggctgaggcaggtggatcacttaaggtcaggagttggagaccagcctggccaacatggtgaaaccccatctctactaaaaatacaaaaattagccaggcgtggtggcgagcacctgtaatcccagctactcagtaggctgaggcaggagaatcgcttgaacccatgaggcggaggttgtagtgagccaagatcatgccactgtactcgagcctgggtgtcagagcaagactccgtctcaggaaaaaaaaaaaaaaaatcccattagggaaatgcacaacaaaacaataatgagatactatgaatacacctactacgatggctataatttattttaaagtgttgggaaggatgttgagaaataaaaactcttttaccctgctagtgggaatgtaaaatggtccagttgctgtgaaaatcaatctggcagttcctgaaatggttaaacataatgttagcgtataatctccagttctgctcctcagatctacctgacagaaatgaaaacatttccacactaaaacaggcacataaatcttcacagaagcattattcacagtagccaaaaaatggaaacaacctaaacatccgtcagctgatgaatgggtaagcaagatgtcatatccttaccacactttagaatattattcagtcataaaaagaaagtaataatgatacacgttacagggacgaaccttcaaaacattatggtaagttaagctagtcatgaaggatttacatactgcatgactccatttatatgaaatgtccagaacaggaaaatctctcaagaaaaagcacattaacggttgcctagggctggagggcatgggggtttgaaagtgacagctaaggggagctggatttctttcggagatacatacgatctaaaattgtggtgatgcttgagcccaggagtttgagaccagactcgccaacatggtgaaaccctttctttactaaaaatacaaaaattagctgtgtgtggtggcatgtgcctgtaatcccagctatttgggaggctgaggcaggagactcgcttgaacccgggaggaggaagttgcagtgagccgagatcatgccactgcagtccagcctgggtgaaagagcaagactctctcaaaataaaataaaattgtggtgaagaatgtataactctgtgaatatacaaaaatccattgaattgtacactttaaatgggtgaattgtatatgaattatggctcaataaagtggttttaatgtgtctcatgccttaagggattactagtttagtatatggtctccagtagtggtttaatgaaattccgtgggagatctcttgagctttattcagagcgttgttttaccctcctagtgtccactccctgctgtctttgcataggagaaccacagtcctgtattcagaggtaaaagtggataagtatctcatgatttgaggatagataggtgtgatggaaagagagttgtcattcacttggtctgccctgttccctaagtgtatgtttgcaccccacacctctgtcatccttgttctgaaatgagtgctattctacctcaggaacatactgatgacccccagcactgtgaaaatcagaacagtgaatggcaagattcaaaggggccatgacaaatattagggaaatggaaaagtagaatgagatccatccattgtggatcaaacctaacagacaatggcagcaagaagtggggagagaagagaaactttctctgaagtcttgcctattctgtgcctccaacaatatgccccttccccataacttgcccaacgaatctcttcaactgtatcctttgtaatatcctttataataaaccagcaaacataagtgtttccctgagttctgtgagcacttcagcaaattaattgaacccaaagagggggttgtgagaaccccatcttttttttttttttttttaagacaggatcacgctctgtcacccaggctggagtgcaatggcacagatcactgctcactgtaaccttgaattcatgggctcaagtgagcctttcacctcagcctcccaagtagctaggactacacaggcttgtacctccaggcacagctaattttactttttattttcttgagacaggtctcactctgttgcccaggctggtcttgaactcttggcctcaagtgatcctccagccatgagccactgtaaatgtctgggaatgccaacttgaagcccagctggtcagaagttctagaggcccagacttgcaactggtgtctgaagggatggcagtcttggggactgagccctcaacctgagggatctgatgctatttccaggcagatagtgtcagaattaaattggaggatacgcagttagtgtctgctgcagaactgattgcttgcttgctggtagggggaaatccccacatatctgggggtcattgaagtctttggtgttgactcttactgtgtttgttgttttcatgtgagagcagaggaaaagcaaggaaatgttttcctctggtcagttttccagaccagtctttacagaaacacacacagagcttcaaacaacactacacttacacagccctaaaagttagtaagtacctctttcagttctgcactccaagcacttcaatgatttcagccttactgtagtcctggtgttgatttttaacatccatctctcagcaactggcaaaaaaaaaaagacaaaaaatatcagtgaagatatatggattatcaaccaacttgataaaattaatattttgcacaataatgcacctaacaactgtaaaatacatgtccttttcaagtgcacatgttatattcaagacagaccacatactaggccataaaaaaagcatccgtgaatttcaaaggatcaaaatcgtacacaatgtattctttggtcaaatgaaattaggaatcattgacaatgaagtacctagaaaacccacaaatgtttggaaattaaacacacttctatataatccataggttaaagaagaaatcaaagggaaaacgaaaatagtttgaactaactgataatgaaaatgcaccatataaaaatttgtggggccaggcatgggggctcatatgtataatcccagcactttcggaggccaaggcgggtggatcgcttgagctcaggagtttcagaccagcctaggcaacagggtgaaacctcatatctacaaaatacaaaaattaacaggatgtggtggtgtgcaattgcatggctgtggtcccagctatgtgggaggctgaggcagaaggatcgcttgagcccgggaagtcgaggttgcagtgagccatgatcacaccactacactccagcccaggtggcagagtgagactttacctcaaaaataaataagtaaatacataaataaataaaaagaaaatttgtggaatggagttaaagtagggattctgtatttaaatgcttatattagaagagaaggcctagaatcaataactacaggttctactttaaaaggctagaaaaggaaaagcagagtaaaccctcggtacccagaagaaaggaaataagatgagagaaaaaaataaatgaaatatataattagccaaactaaaagtgaattctctgaaaaatcaacaaaattgataaaaccttgggtgggcatgacggctcatgcctgtaatcccagtactttgggaggccgaggcgggcagatcacctaaagtcaggagtttggaaccagcctggccaacatggtgaaaccccatctctactaaaaatacaaaaattagccaggcatggtggcatgcgcctgtagtcccagctactctggaggctgagggaggagaatcacctgaacctgggaggtggaggttgcagtgagctgagatagtgccactgcactctagacttggcaacagagcaagactccgtctcaaaaaaaaaaaaaaaagagttgataaaaaccttagctagaattatcaatttaaaaactgcaaagacaaattacatgaaagaacttatcactaaggagcattttagatattagaagtctaacagaattattgcgaggccaaggtgggcaggtcatgaggtcaagagatcgagaccatcctcccaacatggtgaaaccccatctctactaaaaatacaaaaattagttgggcatggtggtgtgcgcctgtagtcccagctactcgggaggctgaggcaggagaatcgctggaacccaggaggcagaggttgcagtgagccaagattgcaccactgtactccagcctggtgacagagtgagactccgtctcaaaaaaaaaaaaaaaagaaaataattattatagacaagtcaacaaatttgagaattcagatgaaatggacaaaatttctaaaaaaaaatatataacttactgaaacacacaagatgaaacagatacattaaggaaattgaggccagacgcagtggctcacacctgtaatcccagcactttgggaggccgaggcgggcggatcacaaggtcaggagatcgagaccatcctggctaacatggtgaaaccccgtctctactaagaaatacaaaaaaatcagccgggcgtggtggtgggcgcctgcctgtagtcccagctactcaggaggctgaggctggataatggtgtgaacccgggaggcggagcttgcagtgacccaagattgtgccactgcactccagcctgggcgacagagcgaaactccatctcaaaaaaaaaaaaggaaatttaatttattacatcaaaaaaagaaatctccaggcctagatggttttgccagataattcaaccagaaatttaaggaacaaataataccaatcttacacacacttttccagaaaatagggaaggagaggacagttcattttttgaggccagtactaccctaataccaaaacctgataaagatattacaaggaaagaaatgacagaccaaaaacctcatgcaaaaattcttaagaaaatggtagcaaatttggctgggcatagcagctcgtgcctataatcccagcactttgggaggccatagcgggtggatcacttgaggtcgggagttgggagaccagactggccaacatggtgaaaccctgtctctactaaaaatacagaaaaaaaaaaaaattagccaggcatggcagtgcatgcttgtactcccagttacttgggaggctgaggtgggaggatcacttgaacccgggaggcggaggttgcagtaagccgagatcatgccactgcactgcagcctgggcaacagagcaagactttgtctcaaaaaaaaaaaaaaaaaaaaaaagaaaggcctggtacagtggctcacacctgtaatcctagcactttgagaggccaaggcgggcggactgcctgagctccggagttcaagaccaccctgggcaacatggtcaaactccgtctccactaaaatacaaaaaactagctgggcatggtgacacgtgcctgtagtcacagatactcgggaagctgaagcaagagaatcgcttgaacctgggagatggaagttgcagtgagccgagatcacgccgctgcaatccagcctgggcaacaaagcaagactctgtctccaaaaaaaaaaaaagaaagaaagaaaaaagaaaatggtagcaaatttaatctagaaatatgtaaaaaggttacaaaatgaaccactaatacaagatttaacaaaaaagaaaaagagaaatagaaaatgctgagctagaagcagttgggttggctgggaggcaggattccatgtaggccaatgacattttgaaatggcattgttttctgcttaacagttttaaaaatcaattttattcatattagttgaataaaggagaaaaaaatatgatcactttagtatataaaaaattatcggacaaaatacaatatcccttcatgatgaaaactctcagcaagctagaagtagatgagaacttgttcaatttgatagtctatgaaaacttccagctataatatagtgatgaaatattaaatacaatcctcctatgataaaaaaggcaacaatgcctatctatgactactaatgcaagtcctagcgattacaataaggcaacaaaataaatgaaacctataaatactggcaaagaagaaaacttcctctgtagatgactcaagtatttacttaaaaatcctaaagagtagattcttttttctttttatagatagggtctcagtctgtcacccaggctggagttcagtggcgtgatcaccgctcactgcaccctcgacctccccagctcaggtgattctcccacctcagcctccagagtatcggggactacaggcatgcgccacctcacctggctaattttttatagagatggagtttccaccatgttgcccaggctactcttgaactccagggctcaagcgatctgcctgccttggcctcccaaagtgctgggattacaggcatgagccactgtgcctggataggtcccaatctataatcgaatgaaatcagcttcttttaatcatccgtccaccatcttttggatggtccaatacctcttcaagagctttcattttactgttccgaaaaaaaagggctgaaccgatagtggatgctaaatattaatgggaaaatagagggatccattaggagaatcttgggctgtttggcatcatcactcactggaactggggacaacttcttagatctctgttacataggacatttcaagataagataatgtttacatgatctaaaatatgactgtgtttaagaagtagagacaaacagttcaccaaaaccatggctaaaaatggttaagaacttgtcagtcttcctcaggggtcctctctttgcagaagcactgagaccacagaggcaagagctggggaaggaaaactgcccatgagatgagatgtgcctctcagcttccaaaatcggggaggtaagagggattctggacaaaatgaaaccctgcacccacaaggagtccagcagacagatgtagacaccaagcagacatcctcataatctaaaagtagggtccagacagcaagtttctggcccatcccacactctgctaatgctgacctggacctaaaattaagccactcaaccctatcttgagataacagagggagaaaatgctccctccattttactttctagggttgcaaagggatgacaccatccacaccagaactgcatgaatggcatcaggaatgatcagagaccataaattccagtgagaccaataacaccatttctggtcctgcatgctcttccaaactttgccactaaccccttcaagaggtacagtctatttccctttctcttgaaattgggtaggcctttgggactcccttgataaacagaatacaacagaaatgacactgtgtatctaacaaggctaggttagaaaaggcaacagaacttcatcctaatctctctcaagatgccccccatggaatccagccatcatgctgtgaggaatccaagcagctacatagaaaggccacaactagatattccagctgtagtcagctgaagctccagccaacagccaacatcaaccaccacacgtgaaaacgagcaagccttcagatgattccgactcccaacctccaagccacctcagctgaagccaagtagagcagagactagctgtcccccaatgctctaatatgcagattcataattaaaaagaatgttattgttctaagccatgaagttttggggtggtttgtcatgcagcaactggaactgcctgatcacaccacacacacaaaagcagaaaacaatgccatttcaaaatggcattgggccacatggaatcctgcctcccagccaacccaactgcttctagctcagcacttcctatttcttttttcttttttcttttttttttttgagatggagtcttgctctgtcacccgggctggagtgcagtggcacaatatcggctcactgcaacctccgcctcctgggttcaagtgattctcccgcctcagcctcctgagtagctgggattacaggcatgcaccaccatgcctggctgatttttgtatttttaatagagacggggtttcaccctgttg[132 bp omitted]tagcattggtcactacctcttttctcagtatccaagttgaagaagagtgaatttatgacctctgcagcttgacaatatttacaaagaactctcttgagaagtgctttataaaccttgtcatttaatcctcatgcagctctataatttaatatattatttccattcaacagagcaagacacaaaaggtaaagaaagcaagtaagccaggtgcagtgactcatgcctgtaaccccagcactttgggaggccaaggtgggaggactgaggccaagagttcgcgatcagcctagacaacatagcaagatcctgtccctacaacaaaacattaaaaaattagccaggtgtggtagtgtgcatctgtagtcctagcttcttggaggttgagctacttgaacacctgagcccaggagtttgagactgcagtgagcctcatgattgtgccactgcactccagcctggacgacagagcaagactctgtctcaaaaaacaaaaaacaaagagggcaagtaatttgcctaaatttcagtaagtgtcagacttatattctctagttggatgtagcatatacctacaatatacatataatattgtctagttggagatagcatatatctacattatacatatctatatagaagtataaataaatatatatggtactatatctagttggatacagtattctatatatgtcaattaggtcgtttgctcacctccatcattaataatttctagtctccttattctaagttactgaaaggtgtgctaaaatctccaatgatgactgaatttgtctattcatcctttctcttttattgacctttttatatcctgaagctcttttttttttttttttttttttttttgagacagagtcttactctgtcacccaggctggagtggaatggcatggtcttggctcactgcaacctctgcctcctgggttcaagaacctcccaggttctcccgcctcagcctcctgagtagctgggactacaggcgtgtgccaccacacctggctaatttttatatttttagtagagacagggtttcactatgttggccagggtggtctcgaactcctgacctcgtgatccacctgcctcagcctcctaaggtgctgggattacagacgtgagccaccgcacccagccttgggtataaacttttatcattatgagctgcctccatgttatctctcataatatttttggccttaaactctatttttttgacataaataaacatcagcttttgttggtgtttgcattaccaccttcatacttttgctttcaactttttttttcttcttttttttgagatggagtctcactctgtcacccaggctggagtacagtgacttggtctcagctcaccgcagcctctgcctcccagttcaagcaattatcatccttcagcctccagagtagctgggattataggtgtgtgtcaccacacccaggtaatttttttaaatttttagtaaagatggggttttcaccatgttggccatgctggtctcgaactcctgacctcaagtgatctgcccgccttggcctcccaaagtgctgggattacagatgtgagaccccacgcccagccttgctttcaacttttctatgtcattatacttaaaagtgtgtcagctactaaaagcatatggttgattttgttcttttcgtccctcgctctgtcacccaagctggagtgcagtggctcaatcacagctcactgcagtcttgacttcacaggctcaagtgatccttccgcctcagcctcctgagtagctgggattataggcatgcatcaccacactcagctaattttaattttttgtagagatggggtctcactatgttgcccaggctggtctcaaactcctgggctcaggcaatgctcccatctcacccctcaaatgctgggattataggcatgagcaactgtgcccagccaatagttaatctttttattgtttagtccagtttcattaaatttctttaatgtaatgtaaattactaatttaattactatgttggaggtaagttcatcaacatttacttctatgtgtccccctctttttttgttgttcttttattcccccattcttaccttttattttattggtcaaataattttattattctagtttgccatattagttcatactgtcatgcactattattttagttaccataaagattataatactgtgcttaacttgttacaactaaaattctcatgcagtgcttctgacagcataagtacaaccacagtggaaatgtttagcagtatctacgaaaactgaacatacatacatcatacaatccagcaattctacccctgtttatctccataatgtctgtgtgcaggggtgggggagaggattaatacttatgtgcatgtctttgtccatattttgacaataatggtcatactagcagtatttctatagaaaaatttgaaacaactcaaatttccaacaatagaacagataaataatctgtgccacatcctacaatggaatactacacagcaaaaggaaggaacaggtacctgctatatggaacaacatggatgaattttacacagatattgagtagaagattattttacttatgagaagttaaaataggtagatattaaaaggagaggtacatgaaggaaatatttttattcagtgggaccccaggagactggataaattatccagatcctacattattgcctgaacaggtagatttgagcaggctgcaatctgttcacccaccaaaagcccatgccacattcctgtagatatctatacttaaaatgacaaagacacacgttcctagagggtcttggaagcgggtataaagttggtcaggtcacgagagctgcacagccagtacaaggaattgcctgggtaggattcagctttgactctagtaatagctgactggttatgcatccttatattagcattgcttctctgtattctctatggttttcttttcatttaagactacttcttggctgggtgcagtggctcatgcctgtaatcccagcgctttgggaggctgaggctggaggatcacttgagaccaggagttcaagaccagcctaggcaacatagtgagactctgtgtctacaatagtaaaaaatattagccgggccgagtgacatgcacacctgtagtcccagctactcaggaggctgaggtaggagggtagcttgagcccaggagtttgaggctacagtgtgccttgattgcaccactgcaacccagcctgggtgacagagcaagaccctgtctcttaaaaaaaaaaaaatggttgggaggttatgtacagttgcaaataagaacaaaagatgtgattaaaactttcaatatgttaatcttagctctgaaagttactaattctgtgctttgacaagtattttattggcattacctagatttcctcatcaataaaattagaaaaacaacagcaccttgtacctcacagagttgtcagaattaagtggaaaaaaaactaacaacaaatcactcccatggcacataataagtacctaaaaatcacctaataaatatcatctatttgtattgatgatgaaaagactatgtcatgtcatataatctattagtattaaagaaaagtgtcttctgtccttaacatgctttctgaggcctgctctttcttataaagctaatatcttacaaagcacagcctgcaaatgtaattagtcttcactaacaacattacccacagattttttcaaaaagaaaaggacagcagctagagagaagtcattcggcttataaacatagctcagagaatctgacccaaatagttaacaaattgaaaatattaacaaaagatcagtcttgttccttggccaatccagtcttttatgcctatttgtaactattaacatcaattctgttatcagaaatcataaacccatcctcagcagtgtgatttatataacaaagtctcctaagacttctggtcttgaaagattaatgctgtcttgtgaaagttacctaagtctgtacaaatacatacatacatatataattctgactagctaccttacttagctgcctacctgttctcctggtaattatgcataaattaatatgtatataattctaaaaggtgtaaatactcagaatgtttgtcaaatcagttgggcatcaatgacacttcctttttatccctacacacatggaagtctaacaaaagcatgactgatttgaatttctttttcaagctaagagtagagaggtcttctctcattcaaatgactaattcatgtgaatctttctgaaaaaaacaagaacatattaacatatctacaaggaaaaattgagaagaatgtacaccaaaatattaatagtgaacattttctagataataaaactatgagtacttacaactttctattttataagtcaacttaggttactgaatttttttcaattagactgcattaattccatcatcaggaatgataaaacctaaagcatttttctaaagagctgggagggaaagctatcttttacttattaagaaaactgtgagcaaacaggctggcaaaatgacacagagcagcactaaaaccaaactgaccaaaataaacaagcctaccaagtcttgcacattctttttttttttttctttttttgagaaggagtctcactctgttgcccaggctggaatgtagtggcacgatcttggctcactgcaaactccgcctccctagttcaagtgattctcctgcctcagcctcccgagtagctgggattacaggcatgtgccaccgtgcccagctaattattccatttttagtagagacggggtttcaccatgttggtcaggctagtctcgaactcctaacctcaggtgatccacccaccttggcctcacaaagtgctgggattacaggcatgagccaccgtgcctgaccaagtcttgtacattctcttcccatatttcatcaatgtactgagacatttccaatattaagatttttgttcagatgtgcaaaattgaggtaagtggccctttcacactgaataaatactgtttgggccacagtggaggcttaacaaatgtggttttatcattgcctttctttactgaatgaccagttaatataatccttgaaaagctgctaataaacgcctatcatagttcaactgatttataatttagcaattcattgtgtacttttgctcacaaatatgaatgttatatgatattccatcttatattttttatattagtatctccaatttcttattatctatgtagtattacatcacttggatgtaaactgactgacttaatatttacataatacaggaaattgtttttggacaaactcttcctaaagttcatttccaggtgttatagatcagtggttcaaaacatttttgggttgtatatacccttaatactctcataaaattagagacttttgccgaggaaaaaatacgcatgaataaaataaacatacaataattaggtatataattccaaggcaaattattccaggtgaagtatccctgttctagacagagcatatttgtgagccactgcacttgaactccacaaatttttgaattgcatataattttcacatgtcatgaaatattattctccttttgatttgttgtcaactattgaaaaagttaaaatcaatcagttcacaagccatacaaaaataggctacaagcagggtttggcctacagagccatagtttgcaaacccctgctatagacccagagaccattataccatacacaggctacacaattatgtaacttggaaaaaaaaaaagacacctcatgctgccaaacctcatgcaagaactagctgggtaccacatctccatctcttaacatctccatatcaaacacaggctgtgctttttctgttggaaccttcatcctatttccttaattacaagtgtaatttttttttttttttttgagacggagtctcgctctgcctcagcctccctgagtagctgggactatagacgcccaccaccacacctggctaatttttttttatttttagtagaaatggagtttcaccatgttagccaggatggtctcgatctcctgacctcgtgatccgcctgcctcggcctcccaaagtgctgggattacaggtgtgagtcactgcgcccggccacaagtgtaattcttaattacaactgtattcctagctacttggaaggctgaggtgggaggactgcttgagcccaggagttccaggctgtagtgagctatgatcgcaccactgcccatcacaattaacctcatattttcattgcaccttatatgtgaatgtggaatgacttagaatatccacataataaggttttaaatttaagcttaataatttattattatcagccaccgttttgttactctgttaatagtaactttgctaatcctcataaaaatcctttgaaattggtactattattatataaataataaactatagaacagaaagatattgagtatattgcccaaattcacacacagtattaataattagcaaaaccttagattttaattcagatactatagaataggggttggcaaacttttctgtaaaggactagatagtaaatattttaggctttgtgagctaaaaggcaaaattaaggatattatataggagtttatataaaagagagatgaaaaatttcccctttgtttttcctttttt[134 bp omitted]tctcccaggctagagtgcagtggcgcgatctcggctcactgcaacctccgcctcccaggttcaagcaattctcctgcctcaggctcccgagtagctgggattacaggcatatgccaccatgcccagctaatttttgtatttttagtagagatggtgttttgccatgttggtcaggctggtgtcgaactcccgaccttgtgatccacccaccttgacctcccaaagtgctgggattacaggtgtgagccaccgcgcctggccacctccacaaatttttaattgccaaaatccaaaactttatttatggacacaaatttaaattgcatataattttcacatgtcatgaaatattactctcctttttttttttttcgtggtcaactattaacaaaaagttaaaaccaatcagttcacaagccatacaaaaatacaggctacaggctggatttggcccacagggccatagtttgcaaacccctgttctagacccagagaccattataccatactcacacagtcta[132 bp omitted]ctgatcaacatggagaaaccccgtctctactaaaaatacaaaactagccaggcatggtggcgcatgcctgtaatcccagctactcgggaggctgagggaggagaatcgcttgaacccagaaggcggaggtttcagtgagccaagatcgcaccattgcactccagcctgggcaacaaaagtgaaactccgtctcaaaagaaaaaaaaaaaaaaacacgtgatgcggccaaacctcatgcaagaactagctggtaccatataaatctcctaaggtatcccctcggaaaaacttcctgcccttcttaacagctctctctgcacatactctgcaataatattctaactcctaaggtcctctaaaacaaaaaaagttactataaccattcaaacgatctcctatcttgctgtttttccactcatgtctctgaagaaaatctaaactatctaatgtgtaattctacctaagcaattggtctcctccgtaacaaatcaccgtgtgaaggcagactatttctatgtcatgagaatgcttaaacaaaaagagcacacaggagaagtgaacatactgtcaaggtgttatatgaaaattaactctaggaagggcatctgatgaggtactggaaagaaggagatctgtcttcataatgtcatcagtaactgggaagagaaggactagagaccaggtaaatagataagtcactatttggtgagcatttcaaatgaagttattccacatcctgaaaaacaaaaatgcatttcataaaacaaagaaaaaaatcaaaatgacctccagctttgctttaaaatgtgcaactacaatgcttttcttctctcagagctcttctcttggaatacagcaaaatgtggaaagaaagggaatcacaatatactcagcctttcttggagcccagacaggctaaataagaacacattcttcaccaccggcaagcttccataacccatgctgaatatgaccagatggaagtatgagaaagactggaatattgttgactcttcccttcataaagaaaagtcaggttcaccaaagcctgggactgaaatgtttctgtattcacaataatttcctttagacagctatgaaaatgctgtggatctgcaa[135 bp omitted]caacatggtgaaaccccgtctctactaaaaatacaaaaatgagccgggcatggtggtgcatgcctgtaatcccagctactcgggaggctgaggcaggagaattgcttgaacccggaaggcggaggttgcaatgagccgagattgcgccactgcactccagcctgggcaacaagagcaaaactccatctcacacacacacacaaaatctttggagaaacgaatcctactcctggggcctcaatatcatatcttcccagaaccttgccttgggagcaattccagctctaacatctccatatcaaacacgaggctgtgcatatcagaacacagccttgtccatgtgaaacacaaggctgtgctttttcagttggaaacttcattctggatctcaaatatccaactttcttttcgatagccatttgactgcacactgtgcaacgtggttataaggtgaaatgactgaggcagtgaaagaaatcccagtataacaaactccaagaaaccacgtaacttaaaattggccccagaggttggcgaggctgcatgccactgtgtattatgcattatgaaagcgacaggggccatgctttagaacagaaggtctcagagtcttcacagacacagatcgagccatacggggaccttgtccacgtattcctgagccccagaactgcagaaatcaaactctacaaaagctgcaccaggccagttttgatcacagtctccagtgggtcacaacagcgctgtcacaggatcactgataacagcatgacacattcatagtcaccgctcagcgccgtcacacaaacggccccgcccccactcagtcccgcgggcccaatcggggacagtcagggctgtcccgggctgtgcacctgctgtgcacacacaccccctgctgtgcacaccccccgcccccccgggaccatcacaggcgcgcccactcacaccaccacacacggacgcagccacagaacggcacacacaaacacaatcacacagtctccctccccagcaggtgacttgcacacaggcctggggcttctgcctccacaaaccctctccgcgtcccatgaacccaggtcccctgccgtgagctcttctcgcatccagacccgggtcacctcaactcaccacatggaaaacgaacaccaggtcaacggaaaagggagccggggtcctggcagaagcgtagtgccagccgcaatagggcggccgtgggtgcaaacggaggggagcgccggcagctagcaccgcgcggcgactaacgggccgccccggagactcctgggagctcaggcccacgcgcgagtgcgcaggcgcagacgactcaccctgggccgggggtgaggcttggtgggtgccaggggtgctgaggaggccaaggagggcactgggagctccgttccgggagagctgtctaaggacgcggaaccgggtggggaggccagggaggtaaccaagagtccgagccgggcctggaaattctgaggaggaaaccgggaccgcggtatccagacgctccgatctgtacgagccgggcctcgggcgtggtccatgggcgtgaccttgagggtgacccggagcgagctccgcgaagggggattttgcccgttctgatcccgcggaagcgccatcgctggcggcgggtccccgcgcggagcgggcgctgtgtgttcgcgcgcgcgggcgcgcgctgaataggggtggcctcctgcgcccaacctgctgcattttaggtgcttgcctctctttgggatgttgtggccgattgtgtgtgaaaagtgaacggagtagtgttgctgcgcgaggtttcctctgcgtgtgtctatttttagattaggtgtgagtcgcatttgagactgcctttgagtgtggagaattgcaagtgatttgtaggtgtggttgtgactgcctggagtcgtgttagctgctgtctgaggttgtgaatgacaagtggggcctgtaggttggtggttctctgaaggatgtttgattgactgtgactctgcatgtgtttgtaacctactgttacttctggtggttttgtggccttagtgacctaaatatttgaatgattgaggaactctgttatgaccatggctagttggttatgtaagacttgattatctgaatagtagccattaagcctgcctccaaaactgtaactaagtagcaatttagcaaataaaatagagataacagtatcagaggggaagagatgattttcataattcccagattcatttcctggaaacaccatattaactaaaaccagtatgttgaaatgaatagcattccattggggacatgcaggaaattttttttttttttttttttttaccataactaccacttttgttgttgttttttgtttgttttaagacaaggtcttgctcttttgcccaggctggagtgtagtggcatgatctctgctcactgccacctctacctctgaagttcaagtgattctcctgccccagcttcctgagtagctgggactacaggcttgtgccaccacgctcggctagtttttgtatttttagtagagatggggtttcaccatgttgcccaggctggtcttgaactcctgacctcaagtgatcccctccccccgccccctcggcctgccaaagtactgggattacaggtgtgagccactgtgcctggcataactaccactttcaacacttgtatatgagtgaggtttcctactcccttaggcttgctaagataataaaaagtatttgatagatttttaataagtccagtctcactgtagtaattaaaatagttattttgcgggcctggtgcagtgactgatgcctgtaatcccagcattttgggaggccaaggtgggcagatcacctgagatcgagaattcgagaccagcctgaccaacatggagaaaccccatctctactaaaaatacaaaattagccgggcatggtggtgcatgcctgtaatcccagctactcaggaggctgaggcaggagaatcgcttgaacccgggaggtggaggttgcggtcagtcaagattgtaccattgcactccagcctgggcaacaagagtgaaactctgtctcaaaaaaaaaaaaaaaaaagattattctcaactacaacatagaccagataggcaaagatttaaaagttgtcaactgtcttcatcagggcttgggaaggtattctcatccactactatcagtgtaaattggcaaaaagtccaagaagaaccgtttggaaatacacagtaaacctgtggttagaggtagatggaaggcagagctgcagagggaaaaacacagtgttccctctcttcaagctaaaacaggttccccagaatcctgtatactttaccaagagactgggtttctggtgtttgtgagggagcctgatttgtctgttttcccactaactaccatcctggacatctgaagggtacacagggtggacaagtgctgaaatagtgaacattcatgcagatttaactgagttaattctgggagttctgagtcaagtatggtctcacatacgtatatcctccatctttgctttctcaggactgtttctttttccaaaagaggagctcaaaagagaaagttcatctagaaatctcaaagccatgtctcaggtgagatgatgtttcctctctttctgaaataactttttttcatggtgtatgaacatgagcttcactgtcctttaaccttccctgatattgggatttgcttccatgaaattagtcttcagtcagggccagattaggctgaggcaggcaagtggcatgaggtgaaatatttaaggggtaccctcagggctgtgccctcctaaattttgcattctaggtgcctcacctgcctcaccctgtatccagccctgttcacaatttctccattccaaccaaatcaacttaagccttccccaagtgtaccttctggttgtacatattcattgggtatatcattcatcatctcctttctcagtcttctcacaaacaaactgctggaatagaaaggtattgtcttgatttaaatgggaatatatggcttgaatgaatttaacttgtcctgatgctgatttgagacctaagctgtgagtagtcatggagcagacgtggaaaaaccttgatgatctccgctagcctaggttttgcaatggtacgttgggaaatagaagtggtagatcccagcattagtttctggaaagatgtcctgctttgtgaggtgtttaggatagcaatttgattgcaggcttgtaaaggaaacacgttttatgttcctcctctctgatcttttttcattcatgtctgctagccattcctacaaattgtgggctgccagtgaaaacctttccagtattccaatgctgttagagatttgttattttctttttagtttcttctaattttttatttgcgggtgcaggagaaggaaatccatatgccaggccacttttgaaatattctattgttgatcaaacagtactttgtcctcttttcatatctttcagaaaattcctctttagctcatccaccaacctttaaaatactggttttcctcagatgctaattggttctcttcttcttcacagtccgtttttctctacgcacaatcagattcactctgaaggctacacttagtgtgattctagtgactctcaaatacccctctccactctagacctctgtccagagtgtcagaaccgaatattcaacctccagtagctatcaccacctgtatgttccacagacaaagtacatttccaaagcttacctcattacttcctttggtccagcttacattttcttccgtttcccattttcactttctagtcccagcagccatgcatttgcctatgcagataaaatgcctgtatcttttccactctacagccaatttacgaccatctctgttgtaatggtggtcatgtaggagcagttgtcctctgtcagcccgctgacacttccttaatctaggagacatttctaaccatggttacttaattgtcatttccacctaacatgtgataagccttttccagtcttcaggagtattacctcaaaacttttatcacataacgtgtgtcaacttatgtttattgatgttctttacattccttaaagcaacagacccaaagtagggcatgcctcacagtagaatgtataagacggtctattggaaggaaataaaatactaacaatttacattcgagagcagtattcattaacaatgtagattttcataaatgcctattgatggtttataaatagctacaatgttgggaatgtgttcagtatatctttaagaccactgttctgtaggaaaaaaaaatctagtatcatgtcataatatccccattgcctatctccatataccttttccttcttagagctcaaagactgtttcctaacatactgtgccttttgctatttcctgatttactaactggtttttttctccccatgaatttttaaaagctgatgccctgtattcctacaaaacaaattcgttgtgagtacaaaacttttatgtcctcaatgaagcctcggagtacaaaatgaaatttttccttgttttgtgacactttaccttgtacgtatttctgtcattgcatctgtaaaacctactaagtgcatgtatttacatgtatgcccctctcttagcctataacttctcatgagcagggtcagggttttattcattttggtctaccaggcaaccagtcacattcaggacaaatagtgtgatctcagtatgtttagcatgagattataagtaaatacaaatggatgtattttcagagagaattttatgcaatataaaacataaataaggaaactagtctgaccagtaaacattgtcagtactaggtctccaatatctagttctcacacatttccgatcacttcaggatgaactagagtatgcccttacagggatcagtgtcattcaaggatgtgactgtggacttcacccaggaggagtggcagcaactagaccctgctcagaaggcgctttacagggatgtgatgttggaaaactattgccacttcgtatctgtgggtaagaaacactcctgaatctttcactgtcatgcatctccttctaagaattcctgaaacatataggactttgaatttcagg[136 bp omitted]catggtgaaacccagtctctactaaaaagtacaaaaattagctgggtgtggtggcacatgcctgtaatcccagctactctggaggctgaagcacgagaaccacttgaacctgggagacgaggttgcagtgagttgagattgcaccactgcactccagcctgagtgaaagagtgagactgtctcaaaaaaaaaaaagaaaagaaaaggaaagaaagaaaagaaaatatgattatatcatcacttgtgtagtgtaaggtattaactttggtaagacattaatgtatacctcatttactaccttgaagttgtatctttatcttacttcaatagttttaaagtcgaaacagcttagaccaaaagtctcattttccatcatcagggtttcacatggctaagcctgatatgatccgcaagttggaacaaggagaagagctatggacacagagaatttttccaagttacagctacctaggtgagtctataaatgaagtctagtgaacattaaatgtcaagtagttgaagcctttgaatgtttttagggatctatttttgttattgtggtaaaatacacataacattaaatatgctatcttaaactttttaagcatatagttcagtagcatcaagtacattcgcactgttgtgcaaccatcaccaccatccatctccagaactattcatcttgc[134 bp omitted]atttctggctaacacagtgaaaccctgtctctactaaaaatacaaaaaaattagccaggcatggtggtggacacctggaatcccagctactcaggaggctgaagcaggagaattgcttgaacctgggaggcggaggttgcagtgagccaagatcacaccactgcactccagcctaggcgacagagcgagactccatctcaaaaaaaaaataaataaaaataacttccctttatccctactccctagccatgccaaccaccattctacttgctgtctctgtaaatttgactactctaggtacctcttgtaagtgcaatcacatagtatttatcctttttctgactggcttattttacttaatgtaatgtcctccaggttcatctatttccttcatttttaatgctgattaatattctgttgtatgtatatactatattttgcttattcattcatccgtcagtggtccgttgggttccttccatcttttggctattgtgaatattgctgctatgaacatgggtgtacaaatatcagttttagtccctgctttcagttcttttgggtataatctcagaagtggaattgctgaataatgtggtaattctgtgtttatatttaaggagtcaccatactgttttctatagcagctgcatcattttacattcccaccaacagtgtacaagggttccaatttcttcaccagcacttgttattttctgtattttcgtagtatccatcctattagtgatctatttttaaagacctgagatctgtaaagtgcctatacatggctgactttcatgcctctaaaatgtaaattttaggtatgaatatcactccccatgtaaatcttttcgttgtttgcctgggtttgtggaaatattgctgctattaccttaccaagaatctattccatgttttataggtataatgtacatagagatgtaaagtgtaaagttctttgaattctgacagaaggataaacccacgtatctcacactccaatcaagataaaagacagtttcattaacccattaagttccaccaggcctcttccaactcagtccctcccattaagataatcacagttgtgatgtctaccaacatagattcattttgtctattgcaaacctttttcatgtctgctttctttcactcagcttcatgtctgagagatttatacatgtttctgcatgcataagtagtttgttaactgtggaacagttttccattgtacgagtataccagtttatgcatctcttgttgaaagacatttgggatgtttctagtttagacctattatgaacaaagctgctataatcattcttgtaaaaatatttttgtggacatacatgtttatttttcttcagtaaacacgtagcagcgatatcgctgattcataaggcagatgcgtatttcatttctttagaaactaccattttggtttggtagtttagtagctaaaactactataccattttagactttcatcagcactgtatgagaatgttgattgccccacgttcttttctacattttatgttcattttgtccattctggtcattttgaccattctggttgtataacttcgcagttttaatttagatttatcttacaactaataatgttgaaaactttttcaagtgcattttatatcagaggcatctgttcaagtgttttgtttgtttctttgttcgtttgtttgtttgataatttttgagacagagtctcactctgtcgcccaggctggagtgcagtagcacaatcttggctcactgcaacctatgcctcccgggttcaagcaattctcctgcctcagcctcccgagtagctgggattacaggcgtgcgccaccacacccagctaattttttgtatttttagtagagacggggtttcatca[136 bp omitted]gtatttttccttgagtagtaggaattctttacatactgtggatagaaatcttttgttcaatgtatgtattacaaatattttccctagtctatgacttgcatattcattttaatggtgtcttttgatgaacagaagtttttaactttggtgaatttcacttaatcattgtttcttttatcattaattatgtgacctctcaaacaaatatttgtctttttctaggtatagtgaggataattctcttttctaggtatggtgaggatagtgctctgtaatttctttgtatattttgcttttttttttttttttttgagacagagttccgctcttgttgcccaggctggagcgcaatggtgtgatctcaactcaccgcaacctccgcttccctgcaacctccacctcccaggttcaagcgattctcctgcctcagcctcccgagtagctgggattataggcgtgcaccaccacgccccgctaattctgtatttttagtagagatggggtttatc[131 bp omitted]ggtccacctcatgttttgtttatgatgtgaagtagggttcgagagtctattcttctatatggttatcaatttgttccatcagtatttattgactgaattactatggtgatcatagagaaaattgatcacatttgtatcagtctatttttggacaatctgttgtttccttggacataatttaagtcacattgacaataccacctggtctttgattattgtaactttataataagtctggaagtcagttagcgtaagtcctctaactttatgctttttaaaaacttttagggccaggcatggtggctcatgcctgtaaccccagcactttgggaggccgaggcgggcggatcacctgaggtcaggagttcaagaccagcctggccaacatggtgaaactccgtctctactaaaaatacaaaaattagccggatatggtggcacatgcctgtagtcccagctactcgggaggctgaggcaggagaattgcttgaacccggaaggcacaggttgcagtgagccaagaccgcgccattgcactccagcctgggcaacagagtgagactccatctcaaaaaaagcaaacaaacaaatgaaaacaacttttagctattctatgtcattttcttctcaaattcattttggaatcaacttcttgatttctttagataaacgtgctaggttttttattagtgagagctaatgtcttagcaatattgagtcctgtggttcatgacaatgctataactttccattttagttagcttctctaattcctgaaagcaattcctatttttggtatagaaatcttacatattgctcattaagtttctctctaagcttttaatatttctgattctattgtacatagtaagagtggctgggcatggtggctcacacctgtaatctcagcactttgggaggctgaggtgggtggatcacctgaggtcagaattcaagaccagcctggccaacgtggcaaaaacctgtctctactaaaagaatacaggtggcacacacctgtaatcccagctactcaggagctgaggcaggagaactgcttgaacccgggagtcggaggttgcaatgaaccatttctttctttctttctttcttcctttcctttcctttcctttcctttcctttccttccctttccctttccctttccctttccctttccctttcccttcctttcctttcctttcctttccttctttcttttttttttttttttgacagtgtctctctctgtcgcccaggctggagtgcagtggcatgatctcggctcactgcaacctccgactcccgggttcaaatgattcttgtgcttcagactcctgaggagtagctgggatgacaggtgggcaccaccatgcccagctaatttttgtatttttttagtagagactgagtttcaccatattggccaggctggtctcgaactcctgacctcaggtgatccgccacagcctcccaaagtgctgggactacaggcatgagccactgccccccgactatttttagtagttttaattacatatagtaattataattttaaccattagtaaccttttaacagagtaaactaagaagtagatagttgtgaattatctgctacatactagcattctataacagattggcaaatgttatgaatacatcatcttacaactttatagatacatatttcctcatagtacaattttttagtgtttaacagatccaaagagcttatccaaaactcttattccacttatattgacctacacagatagtatttattatgtttggattgttcatgaaaattttataatacattaaacaaaactagccagcctctcaagtcatttccttgttaactgtttttatagcacatacaagtaaaaggcaattaaaggcaaatcaagaaaacctgaaaagttaaatacataggtttgtttgttttgttttcctgctgtgtttgatgtatatgaaataatagatatcagacaattcatttctactatatgtttatttgtgcatttttttcttaagttgaatttatagtttttatagttttaaacatagtaaatataatagtaacttatttgactagtaaagccaagtagaataaaaatatgtgctcatagatgcacctctttttattaaaccaacaatattaaactcatcttagttatcaaaattttaccccaagtcacatgaacttgaaaggcctttgggttagttcctacatttctgggggtgttaggaacatttcacttatataaacactcatttttctcttaaaacaatttgaataaactctttaagggagtttataaattaatttggccaagtgttgtggctcacacctgtaattccagctactcaggaggctgaggcaggaggatcgcttgaggccaggagtgtgaggccagcctgggcaacatagcaagacccagtctctgaaaaaatgtatcccagtgcagtggtgtgcacctgtagatccagctattcagaaggctgaagcaggagaatcacttaagcccagaagttcaaggctgcagtgagctatgcactactgcactccagcctgggcaagagtgagacctcgtctctaaataactaaaatgtttaaataattaattaataccatctagaggtaagaaaatatcacatatacataacatacatacatagacatacataggcggacagacccaaacagagatcttataactttcattctaaaatgttagccaggagtcagtaaaatagtattacactctcatctttgctccactttatatttttatctgaatagtgtttctgacacatggaacaaggttagctgttcaatatgtgggctaatgctttttagccaatatttgtagagattttcagattttcatttgccctgttatgtaatcttatggaagctgtggactaaattttaggtgagcaactgagctatctggatgtctccaaagcttggctgagtgaataaaatatccactttgtttccagttagcccttttgtccttctcagctgcaggtagtttcttttgggggccccttgagtgcccccaatgtggggcagggcacctaaagttcaagtgactgtaggggctacagtgggaagggaaaggtcagcagggtggacagagggatggaggagttctgaagggccacctgtcaaaggattcaggggaactgaagggacaatcagaggtggtgagaggaggaaggaggagtggagcagtgggaaaagagaggtcttacaggagccagtgtagagaatccttagtaaagtaatgccaagaagaaaggaagtagagggagttggcagagcatataccaacaggggaacatacaccatcaatcaactgagaagttcccatgggagaaacaggatcaaacaggcctcacagagtcaggaattttctagccctgagagtcaggaagtaaattcccacccaaaagaaaaacccaggaagaaagacttctagcccagcaggtaccttttaaacaaagaagccggtgcctgtaacccaacttcatataaacaagaggagcctaggattctaacccagcctctagagtatgctcagaatctaaggaatcaaaatgttgtaccagcttcaatgggagtttgtccagagtagtggaccaggagtctgactcaccagtgggtccccagtcagtcaggagtgaagaccaaggctcaaaaggtgtgcacttggggtcctgggtgagatgccaaggggtccaataatcaatctgttcctatccaagctgtgttactataaatactaaagaaaaacattatcctgacacttgtaaggcagatctcagggactgctacaatggggttttgaagtactggggagagaatgggccaactctgaatacgataaggaagagaggaaatttatagttgtgggagggggcagtgatgggaaattactgagtggatagggtaatcttgcttagctgacctaccaggattcctactgaaagcaggtcatggtgatcagatatcacctggaggggttggtgaggagagatatcagatattgagagtgggggattccagctaaaccgacttgacagaattctcgctaaaactgggcccttcggtggacatgcccaaggactgggcctaattggttaaagttttatggtattgtcctgagtcctgggatgcagtctttactcctaaaacgtggcccttctggagtctcgatggaaagaccaagattgttgtgctttgttgctttgttttgttttcacctagcccaggacaaaaatgaatggaccaggattttttgttcttttgttttgttttgtttgcctgtttttccactctgctttaaaattttcagtgcatttaaaaataccagaaagggactgccccatattggtcttcatgaatccatgctgaactactctcttttattataacatttccagtttgcttatattgggaccaaggttttaacaaggttcttgttgtcacagggctagaattgcaaactctttttcagagctaaacagccactgaactctttgctcagttccttcagggctctagctttctttcctctttgggctccttgcaatcttgccctgcagcaatgtagttaaccaaggctttgaggatggcttatgccaactttggggctctgcttttttgacttctccattcccagattttgtcttcaagttagggtagctctgaactctaacctctgattcccctatacagatgacttgtgctttctcctggagatctatctcttctgtgctgcctgaactactgagaacatatacctggctaaatgtagctcttatgcagtgtggtttctttctttcaaagattgcatccacttcagcttctggctacttttggtcattctttagtgccttcaaataagtgggttttttttttatcagctggaggattgttttgatacaaacttctttgtcttaccaaaatctagatgtcagccgggcacagtggttcatgtctgtaatcccagcactttgggaggctgcgacgggaggatcacttgaggccaggagttccagaccaccctgcccaacatggcaaaaccccatctctactaaaaatacaaaaattagctgggcatggtggcgcccacctgtaattccagctactcaggaggctgaggcacacaagttgctaggacccaggaggtggaggtagatcgcgccactgcactccagcataggtaacagagcaagattctgtctccaaaaataaataaataaatacataaataaatctagatgtccagaccagcagttctcaaactttctagtcttagacatatttaaaatcttaaagttattaagaacttagaagaactttgtgcgcatatgtctgtgtgtatggcattgtaactggcctaagtccagctgctcactgcttagagaccaaaaacatgagaagtgaggaatggtgaaaggaaagcaacttgattgattaaatgccagcagatgggagttggcaaggcttctgcctcaaagaagccatctctaccttttgggctgagtgaagggggttgtgaaggaaaggatgtggaaagggtggtgcaggagggcacaggcctgtgtgtcttgttccgatgcttatcttgagtaattgctcttccggaggtccagtttgcatcattctgactttggcctggtagtggtgggctaactatttgtaacccccactaagtggggaggattctgcagctgggtgtctctgcctggtttgtttcaaaattggcccctggaattcctaagcaagcacataattagataagtaaacactgttcacatggaagtgccaggtgagaaggtgacaaagcgttttaaagtgtctcaacgttgaaagcaagaaaggaaaaaatgttttaaagtatgtttgaggctgggttacttggttacactattcagaaattaaaagagtttttttttttttctttttgagatggagtattgctctgttgcccaggctggagtgcagtggcacgatctcggctcactgcaagctccgcctcccgagttcacaccattctcctgccttagcctcctgagtagctgggactgcaggcacccaccaccatgcccagctaatttttttgtatttttagtagagacagggtttcaccgtgttagccaggatggtctctatctcctgacctcgagatctgcccgccccggcctcccaaagtgctgggattacaggagtgagccactgcgcctggcctgagagagccttcttaaacctatcagaaaaataaaaatcattgtttaatatctatctccctcatagttttcactttcttctctttccctgggcaaagaaagattatttctttgtttcctgcctgagtctcacatcccattctcaccatgagacctaccaccaggttccaaaatccatatgcctgggaccaaaatggtaatttgaagatcacaatttctttccagtaaacttttatgtttcatatcataatgctgagcatcattcttgatatctgccagggatagttgtgggatttgggtgaaaaatactaactcattctcatcctatttccctgagtaccttttcacatcttgtttgcttttatcccctttatgtaccttgtctaggacaataaatatttgttgactaaatgaatcttgtttcattaggcctctcattggtcctttctgatgtgtccttaaagcattttattcactctcagttcttgactttatgaaagtcctgcaagctacaatcatctgatgaattctcaaattgatttccttgttttatgtgaattgctttcaaatagacatttcagcccatttctcccttgtcaactgtagtggtatattttaatctgccaacagaaatatgactatcaattgtcctatcctttttggtttacaatatatcagaaataataattgctatctttactcttatttgtttattcttttgttcccataatctttttttttttaattgagatggagtctcactctattgctcaggctggagtgcaatggcatgatctgggcacactgcaacctccacctcccgagttcaagtgatcctctctcctcagccttccgaatagctgggattacaggcacgtgccaccacgcctggctaatttttgtattttcagtagaggtggggtttcaccatgttggccaggttggtctcgaactcctggtctcaagtgatgtgcccaccttcgcctccgacagtgctgggattacaggcatgaaccaccacgcccggcctgttcccataatcttatttattattgtttgtttctgtattctcttgttcccataatcagcccaagtagtataaaattgagtccatcatctctgttatactttcttaatgatctctccacaatgtgttatattatctcactctgtaaaatatctttacatcttcttatattctgatttgccattgacagcttccaaaatgagagccatatcatttcaggtgtgggctactgtaattaatctttggatttgccatgatttttccctagttttttttttttttttttttttccagttttttctgtcattatgctaaaaagataacactttttaatatgaactttaaatccctctgttttcaagggtgacaggatcatacccgatttggtcattccaaatgtatttctgtctgtgactcagaactttcgataatctctatttgttcaagactactaaatatacttcatatacagtcagccccccgaattcatggcttccacatcagcagattcaaccaactgtaaatagaaaaaaatacacacacacacacacacacacacacaaaatacaaataaaaatcagtatagtataacaactgttggcatagcatttgcactgtattaggtataagtcatgtagagatgattcaaagtatacaggaggatatgtgtaggtcatatgcaaatactacactattttatatgagggacttgagcatctttggattttagtatccttggggatttcggaacctgtccccttagattggataatgagggaaaactgtaattggttttattcatcacagctggacctttccttatatgatggatactatatgttccatatatacttgcaaaattagccaactaggaagttagagggtacagtaatccatccaagactgcctttacttctgatagcagctgttaattcagggatcctcaagactgcccttaggttcgataatttttttttttttttgagagatagtctcactctgtcactcaggctagggtgcagtggcgtgatcttggctcactgcaacgtccgcctcccaggttcaagcgattctcatgcctcagcctcccaagtagctgggattataggcatgtgccactacaccctgctgatttttgtatttgagtggagacggggtttcactatgttggccaggctggtctcaaactcctgacctcaagtgatccacccacctcggcctcccaaagtgctggaattacaggcatgagccaccggtggcacccggccaggtttgataatttgctgaaaagacccatggaactcagtgaaagctgttatactcacagttacagtttgctacaggaaaagattgaaatcaatcaagggaagaaggaaatgggcagagtctgggaaagtgccaaacatgcagcttctagtcgccctatcgccgtggagtcatggatatcaatcctggcaacactatgtgacgatacatacagagtaccaccaaccagcgaagctcagcacagcctcagtgtccaaagtttttattggggctccatcaaataggcctgattgcccatgtggctgagctcagtttccagcgccttaggaagctgagctgatgcttgctgcatgactcaaagcccctaccctaaatcatattgttactgtctggccagccaaagactccccagcaaacaaataaactcctattagccatgacattcaaaggccttaaaaattaccaccctgaaactgaagttaaaggttcggcctctcatttggcagggttaaattctttaccacacaatactatataatatatcatttagctaaaaaatcaagtttcatttcctccatgaaataccttgactactgtatagactatgtctatttctgttttttatgcattccattgtacttgacatctgtaacatgtgagcagacacgtcctctgatatgatctagtaatttggtacctaattcaacattgttttatatgacatttctttctctatttggttataatcattccccaaaataaggtcctctcatttgcctttccttactgcagcttgtaacagaggccatgtatccagtagttatcttattgattgtcgtgccatgcaagcgaaaatgtctttctcatccatttagaaatcatttactactaagttctttttaggggtacctgccagcattttatcccctaacttcagataacagtgtgtaaacgtatactgagaagattttagagaaaatcgtcaataaaatgttgacctccaaaaacatgagttttagttgggaaagcaatactgtattatcaaattgaggactttacatagaatgatcgtgttaaaatcttaggccgttggaaaatatctggaagtgaatgttccagaccataattatattacaatttcagacagacgggatactgaaaggtagaaaaactatgtgaaagcttagccgggagcagtcgctcactcctgtaatctcagcattttgggaggccagggcaggtggatcacttgaggccaggggttcaagacccaccaggccaacacagtgaaaccccatctccgctaaaaaatacaaaaaacatcagtcagatttggtggcacacacctgtagtcccagctactcaggaggtcgaggcatgagaatcacttgaacctgggatactaaggttgcagtgagccgggattgtgccactgcaatccagcctgggtgacagagtgagactctgtctcaaaaaaaaaaaaaggggccgggcgcagtggctcacacctgtaatctcagcactttgggaggccgaggtgggtggattacaaggtcgggagttcgagaccagcctggccaacatagtgaaaccctgtctctactaaaaatacaaaaattagccaagtgtggtggcgggcacctgtaatcccagcttctcatgaggctgaggcaggagaatcacttgaacctgggaggcggaggttgcagtgagctgagaccacgctgttgcactccagcctgagtgacagagtgagactttgtctcaaaaaaaaaaaggaaagactatgtgaaaactttatgaaaaatcggatagtagcatatacttggaggtgtttgaagttcttagggaggcaatgtaactccaattaccaatacagattagttttacgtgttcaaactgcacataagtggaattgtataatatgtattctttttcataaagcttacactctgcaaaatatttgagattcattcttgttgtcattgtgtatcagcattgtttcttcttgttgctgaggtagtattctattgtgtaatacatgacacagttttacctgttcatcttttgatggatatttgggctgttcccagtatggggctattataaataacaatgttaatcataggtaagatgaatccatctttaaattgccctcccaaatatggatggtagtaaggcaacaatagtaagatatacaataattttttttaaatagttaagattaatcagtgctctgcacatacattgaagaatccagtcctttacagctccagtagggaatagcagagttaaggtaggtgatgtattgggaggaaaactcaaacctatctttccctaaagctgaaaagaagtaatttggcaaatttaaggaatgaagttagaattgttggtcaggagaatttcattattgaccatctctggcagaataaattgaataaattgatggtaacagcaatcagaatactacagtttccgggcactgtggctcatgcctataatcccagaacttttggaagatcatttgaggccaggagttcgcgaccagcctgggcaacataggaagatcccgtctgtgaaaaaaaaaaatcaaaaattagctggatatggtggcacacatctgtagccccagatacttgggaggctgaggtgggaggattgcttgaatccaggagatcaaggctgcagtgagccaggatcaaaccactgtattccagcttgggggacagagcgagaccctttctcaaaaaaataaaaatgaatttaaatatatatatatatatatatatatatatatatatatataatgtatacacaacagtgattatattcatgttggaaatatattttgtcttttgctgtattttataattcctcatgggaatatgttttccagattctctgctttcaagagaaaataaattacggttatatggacatctagggcctagactgtagactaatgtttctgtaaacactaggaaatgagctgagaaagttcatttaccattcatgggctaaatgcaagtgaagaagaaagaattggaagcacttataacacatttagtcgtgaggggataaatgtatagcttttcatctcttcctaaataattttttgtcacattgcctactgttcagcacccttggtaggctcacttcagcagctttgaatcttccattccaagtagaatccctctttcttcattctttctcttctgctcacttatcttttttttttttttgggtggggcggggggacagagtttcgctcttgttgcccaggctggagtgcaatggcacaatctcggctcactacaacctctgcctcccaggttcaagcaattctcctgcctcagcctcctgagtagctgggattacaggcatgtaccaccatgcccagctaattttgaatttttagtagagacagggtttcaccatgttggccaggctggtctcaaactcctgacctcaggtgatccgcccgccttggcctcccagagtgttgggattacagccatgagccactgcgcccggccatccttgtgtttcctataccttctcagtgcagcttatatttataacatgccaaagatatgagtgttttttgcttatgccagtttttcttcattttaacagagtagcaagatttgtatttatgtttatacattttccctaccaagaggtaatttattctggcctttttgtagatcacggtagtgagatagtcccaccatagtttgtctgtatgtatacccaatccatagcatttatgtgaagactcacagtgttaatggtattcttttctagaagaagatgggaaaactgaagatgtcttagtgaagttcaaagaataccaagacaggcattctagacccctcatattcatcaaccacaaaaaactaattaaggagagaagtaatatttatggtaaaacatttactctaggcaagaaccgtatttcaaaaacaatactatgtgaatataaacctgatggaaaagttttgaaaaatatttcagaactagtcattagaaatataagccccataaaagagaagtttggtgacagtactggatgggagaaatcactcctcaataccaagcatgagaaaattcatcctgcagtgaatctccataaacaaacagaaagagttctcagtggtaaacaggagcttattcagcatcagaaggttcaagctccagagcaaccatttgaccataatgaatgtgaaaaatccttcctgatgaaaggaatgctatttacacatactagagctcacagaggagaaagaacctttgaatacaataaagatggaattgccttcatagaaaagtcaagcctcagtgtccatccaagtaatcttatggaaaagaagccctctgcctacaacaaatatgggaaattcctctgcagaaagcctgtttttattatgcctcagagacctcaaacagaagagaaaccctttcactgtccttactgtgggaataactttagaaggaagtcatacctcattgaacatcagcgaattcacacaggtgaaaaaccttatgtttgcaatcaatgtggaaaggccttccgtcagaagacagccctcacccttcatgagaaaacacatatagaggggaaaccctttatttgtatcgattgtgggaagtccttccgccagaaggccaccctcactagacatcacaaaacacatacgggggagaaagcctatgaatgtcctcagtgtggaagtgcctttaggaagaagtcatacctcattgatcaccagagaactcacacaggagagaaaccgtatcagtgtaatgagtgtgggaaggcatttatccagaagacaaccctcactgttcatcagagaactcacacaggagagaaaccctatatttgcaatgaatgtgggaagtccttctgccaaaagacaaccctcactctccaccagagaattcacacgggggaaaaaccctatatttgtaatgaatgtgggaagtccttccgccagaaggcaatcctcactgttcatcacagaatacatacaggagaaaaatccaatgggtgtcctcagtgtgggaaagccttcagtaggaaatcaaacctcattcgccatcagaaaactcacacaggcgagaaaccatatgaatgtaaacagtgtgggaagttcttcagttgtaagtcaaacctcattgtccatcagaaaactcacaaggtagaaaccacgggaattcagtaagtaatgtggctttttttgtaaaaaaatgttaagtcatagtaaaccctgtagatgatgttgcttgcaagcgtaatatccaacagtttaaggtactataccacatggtaacctactgtttgccagcctgtaaaacacacacacacacacacacacacacacaaatattattagacaaattagatgacaaaaatcattaagaagtccaaactttttttttattactagcttcagcagacaaaaacttcctctgtcaaggtgttataaacatttaaaatcacattttccatttccatacatatctttttgttcatcagtaataactagttggccaactgactgtggtccatggactacacagtgagtagaggttctttaaaagaaggaggtatgaactgtatttctcattgcaaatacaaaataaaaattagttgttacctcctcacagttgaccatgattctgacttctaacattacaaattagtttttactattataaacctttctataaattggattatatatcatgtattctttcatatacagcttattaccttcatcatgtccgtgagtctaatcattagtacgtgtggcagaagtttatttatttttatccagtatagaattcaattatatgattatatcacaatttatccattctgctgttgatggacttttacattgtttacagcttagggtcataataaatcatgcttctgagaacatacttgtcttggtgtacatacatgtatttctcttgtgtatatacttaggagtggaatcgctgggtcttagagcatgtgtgtattcagtcagatactggcagacaattcagaactttcaccacatgagataattgacactgaagggaaacagctataaattttatcaatatggtgctggttcaaaccagagaattcatgctgcagggaaactcaatcaatgttattgtgaaaactgggaatgtgaatgtaatatatgtagaaaaacatttagccacagcccaaatcttccaggcaaatgtaataaacgtgacattgccgttagccacagtaaatgccttatttgaactcaaaaagtctactagaggagaggcatccagcatttcccttgttcaacatcagagaattccaactagagaaaagtcctgtgactgtgttgaagttagggcgtggggaggaatatagtctttacctatggtctgtatctactggtcaggtacaaatgatgaatatggaaaagcttatagccatcattcatatattatactacaccagggaattcacataggatgagaactcttcaaatgaaatgattgtaagaatgactttaactgttgctcatttcttttacaccatcaaagaattaataccaaagaaaggaagattacaaggaaacaaatgggtcttgggacttttttttttttttttttgagacagaatcttgctctgtcacccaggcgggagtgcagtggcatgatcttggctcactgcagcctctgcctcccaggttccagtgattctcctgcctcagcctcccgggtagctgagattacaggcacacgccacacgcacagctaattttcgtatttttagtagagacagggtttcatcatgttggccaggctggtctcgaactcctgacctcaggtgatctgcctgcctcggcctcccaaagtgctaggattacagggacttttaactctggggaaagctctctttcatgaaagaagtctagccataccgagaccataatgctaggaagtctatgtgtaggccccctggtcaacagctacagctgagctcccagccatcagctagcatcagctgccaaccatgtaagtgaggcctcttggacatccagtcaagccttcagatgactgtggaccctgctaacacccaactggtaccacaaatgagacctcaagcaagaactgcccagctgaggccttcccaaattcctggccaacaaaatcatcaggctttttaactacaaacagttttattttttatttaataaaaaagtttttatttaacttgattgttttattaaaagggaaaagtaattttttagtatctgttaatatataataaaaataaaggtataagcctgggcttggtggctcatttctgtaatcccagcactttgggaggtgttgggaggatcacttgagcccaggagttcgagaccagcctgggaaacatgccaaaaccccatctctacaaaaaattagccaggaatggtggcacatgcctgtagtcccagctactcgggaggctgagtgggaggatcacttgggcccgggaggcggaggttgcagtgagccaggatagcaccactgcactccagcctgggtaacagagcgagaccctgtctcataaataaataaatacataaaggtgtaaatatatggattctagagtcaatgagcaaaggtattgttgttactaataggtgattttggcatgaagaaaaactggccataaaatacagttgaagatttggctgcatttttgccttacgattacataccttaataattacaactcaattgaggggtccatatatattctttctcattttctggcagtaaatcatattcatcatatacttcccaattttgcacacacaaaaaatgaaaatagcccccaaaagaaaggcaggataatgcgatctatcctcaaaagaccccgtgctgtcatttctcaacaaaggcgcagagagaaatcaaggtatggaatctaatgaatgtccgtgaaggaggtacttttgaatgctttaaagaaagtctaaataaagttgcgttttcttttctttttttttttttttgagacagagtttcacttttgtttcccaggctggagtgcaatggcgcaatttcggctcattgcaacctctacctcaagcaattctcctgcctcagcctcccaagtagctgggattacaggcgcccacctgtatttttagtagagacggggtttcatcatgttggccaggctggtctccaaagcctgacctcaggcgatccacccgcctcagcctcccaaagtgctgagattacaggtgtgagccaccgcacccagccgaaattgtgttttctaaagctatttacatataagctgccgctccttaggaaaatttggtcctgtggtttatattttggcatgaaacagcattgggctgtattccagaatcctgcttgaagatttcttttgaagaaatcagaaattttctttgcattttttttatttttttgagacaggttctcagtctgtcacctaggctggagtagagtggtgccattatagctcactgcagacttgaattcctggactcaagcaattctcctgcctcagcctcccaagtagctaggactacaggcaggcgccattcctctcagctaatgtttttattttttatacatatggggtctcgttgtgttgcccaggctggtattgaactcctggcctcaagcaatcttccctcttcggcctcctaaaatgctggggttacaggtgtgagccacttcactcactttagagattttcactttatgaattgataaatacagcattgcatcacttaatagggatacattctgagaaatgcatcatgaggcagtgtcatgatcgtgcaagcatcacagagtgctgatacaaaccgagatggtacagcctactaaacacctaggctatatggtagagcctgttgctcctaggctacaaatctgtactgcatgttactgtgctggatactataggcaattgtaacacaatggtaattatttgtatatgtaaacctatctaaacacagaaaaggtacagtaaaaatgtggtactataatctttttttttttttgagacagagtctcactctgtcgcccaggctggtgtgcagtggtgtgatctcggctcattgcaacctccgcctcctgggttcaagtgattctcctgcctcagcctcatgagtagctgggactacaggtgcacaccaccaaacccggctaatttttgtatttttagtagagacggggtttcaccatgttggccaggatggtctcaatctcctgacctcgtgatccacccgcctcggcctctcaaagtgctgggattacaggtgtgagccaccatgcctggctggtactataatcttatgagaccaccattatatatgcagtccatcatggaccaaaatgtcatgtggtgcatgagtatttttcatctaacttatatattgctcaatgaagtttgggcaactctaaggagcaaacatgtttatagaatctaagtcaacttgacctaaacatatacgacaaaataggagtgattttacaaattcatattttgtagacctaactgcaaggtcataaggcatatgcaaaatgagttcatcagttcagaggactaacaggactccacagagcatacccaggaaatgtttttacttagaagcaaaggatgtggctcagcaaaagaaagggaaggtaagcattagggctcagaatcatctagctgcacattcctcagtggttttattcacacacagaccgcacactgtctctgaactgaagcactaagacctgtatcaaacttgatttggggagagctgacagcagaacttctctacatgggtttttttgttgtcattgttttgttttttgagacagagtcttgctctgtcacccaggctggagtgcaatggtgcaatctcagcccactgcaacctccgcctcccaggttcaagcaagtctcctgccacagcctccctaagtatctgggattacaggcatgtgccaccacaaccagctagtttttgtgtttttagtagagacagggtttctccatgttggccaggctggtctcgaagtcctgacctcaggcaatcctccgcccacctcggtttcccaaagtgctgggattataggcatgagccaccgtgcccagccactgcatgggtatttatgcttctctgttcactggttacatagtcaagccaggctatctaactggttatgtaagtttaaaaaagttaaaaagccatcataaacaaattggctctgggagtctcccagggaatatcagactttaactagtaccttgtatagctcactggccttatcccaaccaagagtcagagccagacatctgggcatcgtggagataattttagagctttgcagtctgactgtaaatcagctccatcttataaacatggttcctataactgctgtgtatttcctgataatgtatgtgaacaagcatatctcctcaccctctgtgtccccagtatcagatagtgcacagtacatctcaaatgtgatcatttcttgtcagctaatgcttgaatttctccactcagtttctggtctagcaatagagccaggcttgccatgtcctgcttcacaagtaatgtgcaacagcaaaagcacaggctccaacactagtctacaacatgcacctgggatgttctagatatttatcagtttataatcaggctttttttttttttttgagacagtgtctcgctctgtcgcccaggctggaggcagtggctcgatcttggctcactgtaagctccgcctcctgggttcacaccattgtcctgcctcagcctcctgagtagctgggactacaggcacctgccaccatgcccagctaattttttgtatttttagtagagacggggttttactgt[138 bp omitted]agtgctgacaagaatgtggaacaactggaactctttcttttttaacttttgttttagattcaggagtacaggtgtggatttgttactggaactttcatacattgctaataggaaaggcaaaatggtaaagccggtctggaaaacaatatgccagtctcaaaaagttacacatccaatatgacccagcaatcccacttataagtacttatcctagagaaatgaaaaattatgtgcacacagaaacctgtacatgagtgtttgtaagtattatttataattaaaaaaaaaactagagacaagcaaatgttcttcagtgtgtaaatggatacactgtggtacattcccaagatggaattctactcaacgataacaataatgagctactgaaacatgcagctacatagatgaacctcaaatgcattacgctaaaggaaagaacccagtcccaaaaagttacatactgtatgattccatttatatgacatgctggaaaaggtgaaaatataacaacagaaaacagatcaaatgttgctgagtgtctggggtggggtggggtctgaatacagaggggttgcacgaggcaattctttgaggtgttggaattgttttgtatcctgcttgtggtcatagataaaaaatctatgcatgtgtaaaaaatagaagtatacatacaaaaaagtgaattgtactgtctgtaatttttttaaataaataaaaatccctagctctgcttcatcagcagcagtacctcctgatttgtgtcttcaaagatatctttagactggcttctgaattacatatccagtagtagtcagcctacacacacacaggccttgccacatggtctcatcattgttccgcaggtcaactcacaacacaagtaacacattacagttagcccgtatttgtaaactccatccagatgatcagccccccattggagtggcaggcttcatgtctgggggtggcacacctatggaagatggaactcagtgtgtgtgctctgttgggcgtctccatcacatctaacagtggctgacaaaccagccaatacatagtcatcagggcatatgcaatcattgggaataatactaagtggggccaattctgctatcccttggttctcagtggtattcttaattccaacacagtgccatttaaaggtccctgattgtatatgtgcagtggcacaatctcggctcactgcagcctccgcctcccaggttcaaccaattcgtcagcctcagcctcccaagtagctgggattacaggcatgtaccaccatacccggctaatttttgtatttttagtagaaatggggtttcaccatgttggccaggctggtcttgaactcctgacctcaagtgatcccacgcctcagcctgccaaagtgctgggattacagtgtatgtttttattgctgcataatgattgtacatatttatgggatatgtgtgatattttgatacatgcatacaatatgtaataaatcagggtaattaggatatccacctcaaacatttatcatttccttgtgttagaaacatttcaaatattctacctattttgaaatatacaataaattattaactatagtcatcctactatcctatcaaacactagaacttattccttctatctaaccatatatatatttttttgagacagtctcgctctgttgtcagactggagtgcagtggtgcgatcttggctcacggcaacatttgcttcctgggtttaagcaattctcctgcttcagcctcctgagtagctgggactacaggcgtgagccaccacgcccagcttatttttgtatttttggtagagatgggatttcaccatgttggccaggatggtctcgactcttgacctcgtcgtgatccacccacctcggcctcccaaagtgctgggattacaggcataagccaccgcactcggccctatctaagcatatttttatatccattaaccaacctctcttcaccactagccactcacttccgaacctctggtaaccatcattctactctgacctccatgagatcaactcttttagctcccacttatgcatgagaacatgccaagtttgtctttctgttcctcgcttatttcccttaacataattaacctccacttccacccatgttgctgcaaatggtaggatttcattctgtttatggctgaatagtattccattgtgtataaatccattatgcattgatggagacttaggttgattccatattttggctgttgttaatagtgctgcagtaaacttgggtgtgcagatacctcttagatatactgatttccttccttttggatatgtacccagtagtgagatttctggattatttggttgatctatgtttagtttcttgaggaaactctataattttttctatagtggttatactaatttacattcccaccagcagtgtactaaagtgttcccctctctctgccctcaccaagatctcttattgtttgtctttttgatagtggtcatttttttatttttattcatttttttgagacaaagtctcgctctgttgcccaggctggagtgcaatggcgtgatctcggctcactgcaacctctgcctcctgggttcaagcgattctcctgcctcagcctcctgagtagctgggattacaggtgcgtgccacgacgccaggccaatttttgtatttttagtagagaggggtttcactatgttggccaggctggtctccaactcctgacctcaggtgatccacctgccccggcctcccaaagtgctgggattacaggcatgggccaccacacccggccttactttttgagacagagtttcgccctttcacccaggctggagtgaaatggcgcgatctcggctcactgcaacctccgccctctgggttcaagtgattttcctgcgtcagcctcctgagtagctgggattataggggcctgccaccacacctggataatttttgtatttttagtagagacggagtttcaccatgttggtgaaatttgcatgagatttagaaggtggaagtgaagcactgccactattcttggaaggttttcatggatgagcaaatggctacatgtggcatgtccttctcatggccagtggcaaaagccaagtcataatatgaaagcacatgtaaagttctgttggggaccagcctcaacaccacctgtagggtacctgaagtccggtggcgacaaaggaatgagaagagacaggttaagagttcataaaggtgggagccaaggggccagagcaaatcaaaagctgcaaaggcgccaagctctggtctccacactatttattgagtacaatcacttagatctaagaagcagatgttcaggggtgaaacagtgaaaggggggcaatggcagtttaggtacattttctttgtgctgaagcagcataaacttaactactgatttattcttttacttatcagagagcagctgtggggagtgggcctaactagaagccagcatatctggccacattccaatgcttcaaaggagtgtctttctccttgagcacagtgtttatagataagagagcaggtcacactctggtcataggaacgtgatggcaattaggaggctttcctcctcagaggcctcttgtggctttccacaacttattgtcccatatttttatggccagtttatgcaggcactccacaagcccttttcccaacagttctaccaaaagtaacttccactcacattctattcgctaaatccaataaattgcatgttagaatgcatgttaacattatctattggttgtgttttgacaattttcttttttttttttctttttgagacagagtctcactgtgttgcccacgctggagtgcagtggcgcgatctcagcttactgcaagatccatctcccaggttcacgccattcttctgcctcagcctcccgagtagctgggactacaggcacccaccaccacgcccagctaatttttgtattttttttttagtagagacggggtttcaccatgttagccaggatggtctcgatctcctgacctcgtgatccgcccgcctcggcctcccaaagtgctgggattacaggcatgagccaccaagcctggccaattttgataattttcatccacatcaaataagaataaatatagcttattggccgggcatagtggctgcgcatgcctgtagtcccagctactcaggaggctgaggcaggagaatttttaacctgggtggcggaggttgcagtgagccaagattgcaccactggactccagcctgggtgtgtctcaaaaaaaaaaaaaatgaagtaggccaaatgtggactaataatgagaatgtgtaataaatcacatattatgaataacctacttttgtccaaagaatttatgaaatttacatgaaatattcccgttagaataaaaggaaactgatagcagttgttgcatctgtggaaagtgagtggctacagaactggatgttaggggagaattaattttcacatttttggtaatttttgaatttttataatgtgtgcttttattaaacaaaaaatttagaagattttaaaaaataaatgtaatgtcaaaatatatacgccagatactctttaatcccactgttgggaatctgcacaatagaaacaaaagaaggtaaaattagagttctaggtgaacattagaaacaacttcaatgtctgtagtaggtaatggcccaaaatacggacatacattccattctagaaatattctgaaccttacaaagaatgggttacatctttacgtactgacctggaaaagtattcatgattattatgaaaaggacaagacgctgtcaaatgtctgtatgggggtaaaagctcctccaaacacatgcaaaaaatgctttctgtgtacaggttgtttgagcataaaggaagaagaaatacacatactggttatctcagagatttgagggaagggaggaaattgttttcattttatttcactgtttcagtgaaatatttcactggtttcagtgaaacatgtaattttagaaaatttattctcaataaaaaaatttattctcaataatggttaatacaataactcagaaacagcattaaaatgagaccaaaatttacactttagttatccactttctcacttaaaaacatttgattttcaaggattatttaaataaataaatactaatgaaactggtggcttaccaactttttccttaaataaaacaaagacaatgtatatttccatcaacaaatttcatgatgctagactaggatggggagggaggagaggaaacctgactggcttctcgccagtatgaagagtctgatgtaagttaagttgtaatctatgattaaacgccttcccgcattgataaggtttctttccagaatgaattctctgatggtgtgagaagcttgaatgatagctaaaggccttcccacattccttacattcatagggtttctcaccagtatgaattctttgatgttgaataaggtgtgaatgaagtctaaaggccttaccacatatcatgcattcatgaggtttctcaccagtatgaattctctgatgtcttttgaggtgtgaacactgtctaaaagtcttcccacattccttacactcatagggtttctcaccagtatgaatcctctgatgtagggttagttgtaagccatcacaaaaagccttcccacattcatgacattcataaggtttcttgccagaatgaattttctgatggtgtgagaagcttgagtgatagctaaaggccttcccacattcccgacattcatagggtttctcaccagtatgaattctctgatgtatagtaagatgtgagcgatgcctaaaagtctttccacattctttacattcataaggtttctctccagtatggagtcgcaggtgttcagtaagttgaaagccacgaataaaagccttcccacattgcttacattcatagggtttttcaccagtatgaagtctctgatgttgagtaagctgtgatcgctgtctaaaggccttcccacattctttacattcataaggtttctcaccagtgtgaattctttgatgtagagtaagttctgagccataattaaaggccttcccacattcgttacattcatagcgtttttcaccattatgaattcttagatgtttaagttgtgagcaatgaacaaaggccttccaacattctttacactcattgcatttgtcaccattttgaattgtctgttgtttaaaaaggcatggtgtattaacaatttctgtgcattctttacattcagaaagttctttagaatgagttcttttgtggtgactaaaaaataaatggtaactgaagatttttctacactttttacattcagagattttctctctatcataaaattcttgagtgagtaaagtatgttggctaaaaatgggcatgttttcatggttaatcataagttgtctaaaataaccctcctcttgtccctgatgttgctcaaaatgacagttgccttcccagatagcgctgaaaattgatctctcaggactatggcttttaaattcttccatgttaacccactgggataattctgtttcataaatatccctttttggagataacttctggggctcatctctggatgccaagtctgaaagataagaaatatattttaactcctggttttgtactataagagaaataaaatatctatggtagcaatgagagataactgcaaataattcatataagaaataaaaggcttggagaactcttaaatgggtaaaggagcacagggaaatgagagcactcaaatgaagtagttaattagggaaataattcaatggtgctgaaattttgatccacctctgaattaccttgagagtttgttgcaattatggatgttcaggaaacattctaaatcaactcaatcagaatctaagagagttggtcttagaatgaggtcaactgagtcagagttcatatgtttaacactatcaggccaaaggtttatgcagcagattgtcagctgttgccaaatatctatttttttccctttttaaaaaatatcaattgaacccatggctttttatttgagaataaagctgccaatataaactctgcatttcccaagctctttcacagctgagaatgccatgcaactgggttctgcctaaagaaatacagaaatattatgtaataccatctgagttctttcgttaagagccaggtggcccacgccctatattgcctgttttccctcttcctcaacaaagctgatggcaatattgatttgctgtcatgtctatcaaataatggttttgcagagtagatacctttctagcttggattttaatgcgagagaaaattaaatttatatgcctgggttatagacattgtatcaaaaaaagaaaattaatttaaacatctatatggtttcaatcgctattgttctgggtctctgtcacaagcagcttaacctacaaatacagcttcccacagaaattttaaaacttcagctcctaggcatgagaatatagggcttctgctaaccaatataatctcattttgagtccaattcctttttattcattaagctataaccaaattaatctgtcaacaattaggacatgccaaagccttttcctatgttagagcttcatagcttcttccatgtgctaagaatctttttgcctagattttttgtatagcgggcttcatttcatctaagtctcagagtaaaagtcacttcctcagaattgtattcctgataatattatctaatgaagtccttcctgaagtactactggaattacatattcatttattaatctttttaatatttggccaggcatggtggcttatacctgtaatcccagaactttgggagacctaggcgggtagatcacttgaggtcaggcattggagaccagcctggccaacatggtgaaacctgtctctactaaaaatacaaaaattagctggacgtggtggcggatgcctgtaatcccagctactcgggaggctgagacaggagaattgcttgaaccgggaggtggaggctgaagtgagccaagatcatgccactgcactccaacctgggcaacagagtaagactgtctcagaaacaaacaaacaaacaacaaaatatatatatatataatatatatatatgtttttttacccataaagctactcaaggatagagaaatcactataaaaacaacctttacaatataataagtattcaataatcagttgctgaatgaatgaattattaaggaaaaggaattaagatgaagagaaacaatacaaagataacaattgacaatcataatcatttaatgcccttaaatttgtaataactactgaacatctctccatgcttctattcactcctacatcgactgcactgattttatatataaacacatacataaataaaccatgtacttgcttatctataacaagccactccaactgagtggcttaaaacagtaagtcatttattattattattactattgctgttgtaattattagtgaagaccaagtcatgctctgtcacccaggcgagagtgagcgcagtggtgcaatcacagctcactgcaggcccgacctcctgagctcaagaaatcctcctacctcactcagcttttggagaagctgagactataggggtgtgccactatgccctgctaatttttaaatcattttttgtagagaaaaggctctcactttgttgcccaggccggtcttgaactcctggtttcaagtgattctcctgcctcagcccctcgaagtgctgagattataggcacgagccaccacaccagacccatttatcattattgtctttcagtcctgaggattaactgagctcagccaggcattccttacttggcatttctctagtgacagtcacacactggtcaggctggatcattccaatggcttcctccacccacatgtcgggtaccaggcctgaggaaatatgtaaagcttgggactgtaacagctgtgatgcctggggctttctatccttatgtggtctctctacatggtgtgtccagcatagctgtttcaaggtaagagatgccctcttacctggcaactccagactccaaaagcatatggggaagtgcaggcagggagggcgggcatatgagcatatgccaggcacaagctgtctacttttatgacctagcctcagaaatcacaaagtatttctatttattggaaacaattcacttagggctgtcccattttcaaagcaggaagttagacttcttttttttttttttttggtttgaggactgtcacagaagcacagaagtggcagacatggtgtgtgtgtgtgtttttggtgggggggggtggggcacagagtcttgctctgtagcccaggctggagtgcaatggtgcgatctcggctcactgcaacctccgcctcctgggttcaagtgattctcctgcctcggcttcccaagtagttgggattacaggtgctcaccacctgtaatttttgtatttttagttgagatttttgtagttttagttgagatggggtttcaccatgctggccaggctggtctcgaactcccgacctcaggccatccacccgccttggcttcccaaagtgctgggattacaggtgtgagccaccgcactcggccagcggacatgtttacaacaaccactacactcatacacatacttatttatgtacagatataaacacaaacacacacttttctacatcacttccttacagacgatgtttttactaagtgaacatacctgtgaaaccaccacttaaccaagaaacagaacattaccagaaaccccaagccttcaaggcccttcccaggtttaccttacccaccaaaggtaggcgatatcctgccttcttacactatgcagtggtttttgtctatttctgaatttccaataaatggaatgatataggaggtacttttttctccagcatcttctgtccagtaccacatgtgaggttcatttgtaatattacaaatagtagtagtttcttaattttcattactatatagcagcagtactcaatgggtggtccaaggaccacagagggtacctgagaccctatcaggaagtctataaggtcaaagctattttcatactaattccgagacatttgccttttttacttattctcttaccactggacaggagagattctgagagactactagaagtgtgataacgtcacattctgaaatctaacagaatgcgtgattatgtatttctgtgtgttctagaagtttctagagtagtaggtttggggaataaacatgtactttcagaaattagctgactttgttaccagtacttctactgtactcttaaaaactgtatttatttatacctgcatttatgtctgtagcctcattattgtccaagaaattattgtgaaatccccaagttttccatgtacctacatggaaacaaaagaataaatacttcattttagaataatattttattatacaataaaaagagaatatctatttctttttctttttagacagagtttcgctcttgttgcccaagctggagtgcaatcacacaatctcagctcactgcaacccccgcctactgggttcaagcgattctcctgcttcagcctcccaagtagctgggattacaggcacgtgccaccatgcctggttaattttttgtatttttagtagaaacggggtttcaccacttagccaggctggtcttgaactcctgacctcaggtgatccgcccacctcggcctcccaaagtgctgggattacaggtgtgagccaccacacccagcagagaatatgtatttcttatacttgaaaatggatattggttttttgttttgttttgagatggagtctcgctctgtcccccgggctggagtgcaatggtgcgatcttggctcactgcaacctccacttcccaggttcaagcgattctcctgcctcagcctcctgaatagctgggattacaggcgtgaaccaccgcatctggctaatttttgtatttttagtagagatggggtttcaccatgttggccaggctggtcttgaactcctgacctcaggtgatcctcccgccttggcctcccaaagtgctgggattacaggcgtaagccaccacgcccagccagttttttgtgtttttttttgttttgttttgtttttgttttttttgagatggagtcttgctctgtcacccaggctggagtacggtggcgcaatctcggctcactgcggcctctgactcccgggttcaagcaattctctgcctcagcctcccaagtagctgggattacaggcacatgccaccacatcggctaattttttttgtatttttagtagagacggggtttcaccacgttggtcaggctggtcttgaactcctggcctcaagtgatttgcccacctcgtcctcccaaagtgctgggattagaggtgtgagccaccgtgcctggccaggtttattttttgagactacttttattattaaaaaatctggcctggagtggtggctcacatctgtaatcccagcactttgggaggctgagatgggaggattacttgagtcctggagtttgagaccagcctggacaacatagtgagaccttgtctctactaaaaaaaaataaaaatagaaatgtagctgggtgtagtggtgtgtacctgtggtcccagctacttgggaggctgaggtgggaagattgcttgagcctgagaggtccaggctgcagtgagctgtgatcactccactgcactccagcatgggtaacagagtgagaccctgtctcaacaacaacaaaaaagatctgttgtataaccctgtgcccacactggacaatactgcattgtacacctaaaattccattaagagggtagatctcatgtaaagtatttacaacacaagaaaattttttaaagtgtttacatatttaataaatacttttttctatttcttagcatacagcaccaatgtaaataaatattaattatagcatccacagttaaatttctcaatatttgtttttgagaaacactgagtattttttgagaaacactttatttcccactttattgagggaaaattgacaattaaaatttatatatttaaaggatacaacctgatgatttgatatacatttacattgtgaaataatcaccacagtcagctaactaacctattcatcaccttacatagttaactgttttcttttttttgtggtaacaaaaaaacatgtaccttcagcacgtttcaaatatacaatacagtactgcaaactagagtcataatattctggagtctgaatgtggatattcagaatccactcatcttgcataactgaagctttattttatttatttttttgagatggagtctagctctgtttcccaagctggaatgcagtggagcgaactcagctaactgcaacctccaccacccgggttcaagcgattttcctgactcagcctcttgagtagctgggactacaggcgtgagccaccatgcccggctaatttttgtatttttagtagaggcagggtttc[142 bp omitted]ttgttgttgttattgttgttgattgagatggagtttcactcttgttgcccaggctggagtgcaatggtgtgatctcagctcactgcaacttccgactcccaggttcaagctattctcctgcctcagcctccccagtagctgggattacaggcgtgtgccaccacgcccggctaattttttgtatttttagtagaaacggagtttcaccatgttacccaggcaggtctcgaactcctgacctcaggtgatccaccctcctctgcctcccaaagtgctaggattagaggtatgagctgccacacctggtcaaaattagactttaggaaagtttgtgtcagcccctgtgagcttgacagcttccaaatacttaaagacttacctgattagattcgtggtgttattaacaagtatgattttttggctattttataagaaaatgtgtcaaagtctggaagatctgcataactaattggagcaatattttccaaataactaatgcatcatgttacaaaacaggtaccacagataagagatccattcaaaaaacaagacagactagtgagttttaatttaatagattaaattcagaggcagatgtgagatccacgtgtcttcttttaatccaagcattaaagaaacgtgcaaaaaatgaaaaacattgccacttttcacaataactattttcgttttgttttggaaaatataacttatttatgttaacatatagtttattatttttaaatgaattaaatgaatatttcatttttcctagatttaatttctaagacagttaatattgaaggatataatctacatatgcaagagctcttggggttctcaatagtttttaagaatataaaggcatcctgagaataaaaagtttgagactgataactatatatagcattgcattctaacacaatttattttcccatatacctaatgatggacattctggttgcttccaatagttgactattatgattagtgctgctatgaacattcctgtacatttcttttggtggaaataattactcttttctgttaggtatgcacatcagagtgaaattgctgcatcataggatataaatttcttcagctgtagttgacattatgcaacaattttctaatttaggccaggtgtggtggttcacgcttgtaatctcagcactttgggaggctgagataggcatatcacttgaggtcagtagtttgagacctgcctggccaacatggttaaaccctgtctctactaaaaatacaaaaattagctgggtgtggtggtgggtgcctgtaatcccagctacttgggaggctgaggcagaagaatcgcttgaacccaggaggtggaggttgcagtgagctgagatgcgccagtgcactccagcctgggtgacagagcaagactctgtctcaaaaaagcaaaaaataaataaataaataacattctaatttaaaattccactttcaatttactttcaattcttttgcgtatatacctagaagtagaattgcttgattatatggcaattctatttttaatgttttgagaaattaccatactgttttccatagtggctgtatgatatagctcggatatgtgtcccctctaaatctcatgtggaattgtaatccccagtgttggaggtggggcctagtgggaagtaactggattatgggagcggttttctcataaatggtttagcaccattcccttggtgctatcctcatgatggtgagtgagttctcatgatatctggtccttgaaagtgtgtgggctgggtgtggtggctcatgcctgtaatcccagcactctgggaggccgaggtggacagattatctgagatcaggagttcaagaccaggttgaccatcatggtgaaactgtgtctctactaaaaatacaaaattagctgggtgtggtggcaggcacctgtaatcccacctactcgggaggctgaggcaggagaatcgcttgaaaccgaggtggaggttgcagtgagctgagattgcaccattgctttccagcctggacaacaagaatgaaactccgtttcaaaaaaaaaaagaaaatgtgtggcacctccccacgccccccactctctctcttgctcctgctttcaccatgtaaagtgcctgctcctgctttgccttccaccatgaataaaagctccctgaggccttcctggaagctgagcagggccatgcttcctataaagcctgcagaaccatgagccaattaaacctcttttcaaattacccagtctcaggtatttacagcaatgcaagaatgatctaataccttgtaccattttacattctcaccaatagtgcacaaaggttcaaatttctccacattcctggcaacacttgttatgttttttttttaaattaaccatcctattgagtgtgaggtgatatctcattgtgtgcttttttgtttgtttgtttttgttttcgtttttggttttgtttttcagactgagtctcgttgtcactcaggctggagtacagtggtgcaatctcagctcactgcaaccttcgcctcccaggttcaagtgattcttgtgcctcagcctcccaagtacctgggactacaggtgcatgccaccatgcctggctaatttttgtattttttggtagagacggggtttcgccatgttggccaggctgatcgcgaactcctaacctcaagtgatccacctgcttcggcctcccaaagtgctgggattacagtcatgagccaccgtgcccagcctcattgtggttgtgactagcatttccttaatggctagtgattttgaacatctcttcatgtgcctgttggccccagcagcacaagaagtatggagcagatcagaatagcagtgtaatggttctgaaaactaaactgtcattggaactaaagcctacaaaagtagatcagatctttactaaatctaacaggataactacttgctcaaattgattaaatagaatcaagactctctgaaacataataacgaaaatatccaaggtacaactgaaaatcacttctcataccaaaaaccaagaaaaccaaaatctgaaggagaaaaggcaatcaactaatgcaaatacaaggatgaagcacatgttggaattatctgacaaagactttaaaacatgcttcacaaaaaggctttgccaatcaattttaaattctcttgaaacagtatattttattatttatttatgtttttttttgagacagagtctcactcttggcgcccaggctggagtgcaatggcataatcttggctcactgcaacctctgcctcccaggttcaagcaattctcctgcctcagcttcctgagtagctgggattataggctgggccattgtgcccagctaattttttgtatttgtagtagagatggggtttcaccatgttggccaggctggtcttgaaatcctgacctcaggtaatccaccctcctcagcctcccaaagtgctgggattacaggtgtgagccactgcgcccggcctgagccaccacgcctggctgaaacagtgtactgtaaacttaaaaacttctaggagagtagatgttaaatgttctcccacacacaaaaaaataagtttataagataactattgtggaagaacaaaaaaagaagcatgtcaggtaacagatatgttaattagctagatttaatcgtttcacaacatatacatatatcaaaacatattgtagaccataaatacatacaatttgtatttttcaattaaaagtatttaaaaaataatctggctgggcgtggtggctcacacctgtaatcccagcactttgggaggccaaggtgggtggatcatgaggtcaggagtttgagaccagcctgaccaacatggtgaaaccccgtccctactaaaaatacaaaaattagccaggcatggtggtgggtacctgtaatcccagctactcaggaggctgaggcaggagaatcacttgaacccagaagacggagggtccagtgagctgagattgctactgcacttcagcctgggtgaaagagtgagactccgtcttaaaacaaaaaaattaaataataataataagaatccatgagtcaaagagggagtctcaaaggaaaaaattttcaaaacaactataagtacatatatacatcctttatatatatgaatatacagaataataacaccacatacaacttcatacttataacttcaacaaattagaagatatggacgaaatctttgaaaatcacaaactaccaatactctactaagataaaataggcaatctgaatagtcctacaactattaaataaattgaatttataattaaaaagctcccaaaaagaaatctctaggttcagacagttgctctggagaagtttactaaacattcatgtgatgttttacacaacgtcttccagaaaacagaagaaaagacaacacttctcaactcactttataaggccagtattactctgataccaaaacaagactagggtgacacaacaaagaaaatacaaatcaattatctttcatgaacttaaatgagaaaattgttaactaaattttagcaaatcaaatccaacccaacaatgaataaaaagcataatataccatgactaagtgggatttattctaggtataagaagctaatttaatatttaaaaacagttcaatgtaatatattatataaatatgataaataagaaaaataacatgatcacatcaatactcattcatattaaaaaaaaaaaaaacctcccagagcattagagaggggaactccctcaaccttataatataaagtatctacaaaattcctagagctggccgggc[134 bp omitted]atggtggcagacgcctgtagtgccagctactagggaggctgaggcaggagaatggtgtgagcctgggaggcggagcttgcagtgagctgagattgcgtcactggactccagcctggggcacaaagcgagactccgtctcaggaaaaaaaaaaaaaaaaaaaaaaaattcctagagctaacatcatacataatgttaaaagactgaatgctttcccttcaaaatggggaaaacacaggatgtccacttttaccacccttattcaacatagtattagaagttcttgccactccaataaggcaagaaaaagaaataaaaggcatagattatgaaataaaaagaaaattatctatttgtcgataatttgtttataagtaggaatctctaagaaaaaaaaactagtactaatatgcaagttgagtaagatcacaaaatataggattaatatataaaattaactacactccaatataaaaatgcaatgccatttacaaatgctccaaagaaaatgaaatacttaggtataaaactaacaaaacttgtacagattctgtatgatgaaaattgtaagatgctaataaaagaaatcaaggaaaacaaaaatatttggagaggcacgctgtgttcatgctttggaagactgaatagaataaaggtgttctctcttacttcatctataggcttaacacaattcccatgaaaatctaagcaaattttttgtagatacagacaagcttttctaaaacttatatggaaagaaaaaggtcctaaggatagccaaaataattatgaaaaacaacacagtgggaagaatcactccttccaatgttaaggtttactgtataactgcagccatcatgaaaggtggcactaaaagagagatggtcacaaagatcaatgcaacagaacagagaatgcagaaagagagccacacaaatttgcacaactaagttttgacaaaggtgaaaaagctattcacttgagaagggataacttttaaataaatgctatgggcatccatagaaaaaaaagaaccttgatctaaatttcacaactttacaaaaattaacacaaaatgaaccacgaacttaaatgaaaaatgtaaaactataaaatttctggccaggcacggtggcacatgcctgtaatcccagcactttgggaggtggaggcaggcagatcgcctgaggtcaggagttcgagaccagcctggccaacatggtgaaaccccgcctctactaaaaaaaaaaaaaatacaaaaattagctgggtgtggtggcacgtgcctgtaattctagctgcttgcaaggctgaggcaggagaatcacttgaacctgggaggtggacgttgcagtgagctgagattgccccattgcactccagcctgggtgacagagcaagactccgtctcaaaaaaaaaaaaaacaaaaactataaaatttctaaaaaagaacattggagaaaatcttaaggacctttgagtaggcaaacagttcttagacgtgacactaaatacacatacacacaccaaaaacacaattcataagagaaaagaagataaactagacctcatcaaaattaaaaacttttgctctgcaaagaccctgttaaaaggataaaaagacaaattacagggcaacccgctggggtccccttccatgctgtggaagctttgttctttcgctcttcacgataaaccttgctaccgctcaaaaaaagacaaattacagactgggagaaaatatttgcaggtcataaatccaacaaaggcattctgtctaagatacaaaaagaactttgaaaactcaacaatataaaactaaccaaattagaaaatgggcaaaaggcatggagagacatttcactaaataggatagacagatggcacacacagatgttcaacattacttgccattaaggaaattcaaaattaaaaccacaataagatataattacccacctattagaatggctacaatgaaaaacaattagaacaccaagtgctgactatgattagagaaactggatcacacatacattgccagttaagaatgtaagacggtacaaacattgttgacaataatttggcagctccttgaaaaactaaaaatggacttattacaccacccagcaactacactcttgagcatttatcataaacaaatgaagacttgttttcatgtacaagtttgtacatgaatgtaaaaaacaaaaacccatatatatgtgtatgtgtatatgaaataaaaggaaaaaagccattttccaaaggacaagtattgcaggattctatttatgtaacatttatgaaattacataattatacagagaacagaacagtggttgccaaggtgtattagtctgctctcatgctgctgataaagacatacccaggactgggtaatttataaagaaaatggtttaatggactcacagttccatgtggctggggaggcctcacaatcatggcagaaggcaaaggaagagcaaaggcacatcttacatgacagcagacaggagagaatgagagccaagcgaaaggggaaaccccttataaaaccatcagatcttgtgacacttattcactaccacgagaacagtatgggggaaagtgcccccatgattcaattatttcccacctggtccctcccacaacacgtgggaattatggcagcctacaattcaagatgagatttgggaagggacacagccaaacaatatcacaagggttaggaaaaagagaaatgggataagtatagctaacacaagggagtcttgtgaggtattgttgagtattttggctattgtggtggtgacacaaggctacatgtgataaaactgcatagagctataaatatacacacagaaatgagtgcatgtataactggtgaaatctgagtaagttctatgaattgcagcaatgtcaattttttggtatggtattgtactatagttgggtaaggtattaaccctgggggaagctgcaaagggggtacacaggactcccctgtacatttctttgcaacctcttgtgaatccataattatttcaaaataaaaagtctttttttaaagaaaattcatgccaaggaaaaggcctacccaggtataaaaaaactggtaaaggaatgttatctttacattaaaatatgtatgagaatatgtaccatttttccatgattcctctctattagtttcctagggctgccattaacaaagtcccacaaactgggtggcttaaaacaacacaaatgtattctctcacagttctgtagcacttgattgattgattgattgagacagggtcttgctctgttacccagactagagtgcaatggcagaatcatggctctctgcagccttgacctcccaggctcaagcaatactcccaactcagccccttgagtagatgggactacaggtagcatgccaccatgctaggctaatttttttttttctttttggtacagacagggtctcactatattgcccagactggtctcaaactcctaggctcaagcaatccttccaccttggccacccaaagtgctgggattacaggcatgagccaccatgttcagcctatagcacttcaatgaatcacagacatcatcaaagaactctagcctgtagaatggatctgcccttggtctatagcaccccaaactttcctggttgatctccttccttctcaatcatccctctgccatctctacctcctcaatatagtcatatattactttctctaactttcctaatttctgatcaacactatttttttgcctagtgattctattagaacatccatccatgtattgttgatcccctgttagattgaaaacgtctctataacactttaaaaatgtattcccatcacctagcaaagcaacttgtatggatcttttatctatttatttagagacagcatcttgcagtgtcacctagactggagtaaagtggtacaatcttggctcactgtagcctcaaactcctgggctcaagtgatctcccacctcagtctgctgaacatctgggactacaggcatgtaccaccatgcctggtgaatattttaatttttaattttttgtaaagacagggcttttgctatgttgcccagactggtcacaaactcctaagctcaagtaatcctcccacctgagcctcccaaagtgctgagattacaggtgtgagccactgagcccagcctgaatcttttaaaaaactaataagcaggctgggcacagtggtgtatgcctgtaatcctagcactttcagaggctgaggtgggaggattgcttaaggaggtcgagaccagcctgggcaatacagtgagacctcatctctgcaaaaaattaaaaaattagccatgcatggtggcatgggcctgtagttccagctactcaggaaacttaggtgagaggattgcttgagccagggaggcagaggttgcagtgagctgagtttgcaccactgtactccatccagcctgagtgacagagtgaaaccctgtctcaaaacaaacaaacaaaaattaataaacactatagattgtgtcctttgatgtacagaagtttttaggtttgatgtagtcccatttgtctgtttttgcttttgttgccagtgcttttggtattatacacaataaatcattgccaaatccaatgtcatgaagcttttctccaatattttctacttagagttttattgctttagctctcacatttaggtctttgatccattctgagttaatttttctatatggtgtaagacaagggtacaactgtattcctttgcctgtggataatccaattttctccatggaagtgttggcacccttgtctaaaataatttgactatttatgcaagggtttatttctgggctttctattctattcctttagaatatctttttttttttttttttttgagacggagtctcgttctgtcgcccaggcgggagtgctgtggcgcgatctccgctcactgcaagctccgccttccgggttcacaccattctcctgcctcagcctcccgagtagctgggactacaggcgcccaccactgcgcccggctaattttttgtatttttagtagagac[140 bp omitted]ctttgtaatatgttttgaaatcaggttttcccaaagtttggtttaaaataaacttgccagcccaacattctgaccagctggcctgctctctgcaagagcttcctgtgcttgctcactcacctgggcaccatcttcctgtctcttccctcacaaccatccagggctccttcccttgctccaatgaggagattacggctggcttagaaacagaaagtcctagttataagaaaagaaattgagatgagatggaaatgaatgtatccaaatacagtgatttagaactgattaaaataaaaataaatcacagataaaaatggtacttgataagggatacagaggaaataaaggagaagagatgaaacactcatattcagatgaacacaggatcataacaaacaaagcaaacaaacaggcgataaaatagtacttaaatttatgtaaggtttctcttttttgctgtgaggaaaaaaaagaagcttcttgagatatttattcttttttttttttttgagatggagttttgctcttgttgtccaggctggagtgcaatggcacaatcttggctgactgcaacctccacttcacgggttcaagtgactctcctgcctcagcctcctaagtagctgggattataggcgcacaccactctgcctggctaatttttgtattttagtagaaacggggtttggcccatattggccaggctggtctcaaactcctggcctcaggtgatccacttgcctcagcgtcccaaagtgctgggattacaggcatgagccacagcacccagcctcctttttttttttaatgttaactgtacaaagttctttaaaaataacttccaaaggcaaatcacttaaaagagagtacaggtcaggcgcggtggctcacacctgtaatcccagcattttgggaggccaagacgggtggatcacttgagatcaggaattcgagaccagcctggccaacatggtgaaaccctgtctctactaaaaatacaaaaattagctgggcgtggtggcgggcacctgtaatcccagctactcaggaggctgaggcaggagaattgcttgaacctgggaggcagaggttgcagtgagccaagatatgccattgcactctagcctgggcaacaaaagtgaaactctgtctcaaaaaaaaattaaaaaggccaggtgcggtggctcatgcctgtaatcccagcactttgggaggccgaagcaggtggatcacctgaggtcgggagtttgagaccagcctgaccaacatggaaaaaacacatctctactaaaaatacaaaactagccaggcgtgttggcacatgcctgtaatcacagctactcgggaggctgaggcaggagaattgcttgaagctgggaggcagaggttgtggtgagccgagatcacgccattgcactctagcctgggcaataagaacgaaactccgtctcaaaaataaataaataaataaaataaaaagtgaaagattacatttattataggaaatggagtggtgctcatttgagaatagtaaatgaacctttattactccagcctatcactctattacccaggaaagaaaaaagcttcactcctggaacccatgtgtctagttttaatcttatgctagtacactagcagatttagcacagtggaagtgaaacaaaagacagagtctgctttctttgacagtgttatgctttaacattgcagatttccaattctgccccttaaacatcaaggaggagttattataagaaaggaccaaaagaacgtgtaaggatggggaaaatgaaaatgtacctccatttagctgtgctggtttctacaatacataaagagaaaattcatccagttatttgaaagctagccctaaattaataggggggaaagcagaaattccaagaagtagattgtgaattgttagcggaattctgaattgtcaggttcttaatttttagataactttaccaagtgacaccaagttgctataattctccaacatcacctccttgtacaaattcctctgcgctgggttcaggcattcccattcctcctgagagacatctatagccacatctctgaacatcaccaactcctaaaatgacaaataatagtactatttttgaaattataagaaatgtttttaaaaagaaaagagaagtgctaaaagaaggtactgcaaggaaggagacagtctactgaatatataggctaagcctgggacatgggtcaaagaggaatttagtgtgactgaagcggagtgcccatatgttcttaaacaattcattttctgcagacacatcttcttgtgtaggtgggaaactcctgttaatcagtcatctcaaaactaagaaaataagtagaggctcccaattaaattaaatagtcaaaaacttttaaatctttccaaaatgtcttattaaaatctctatcttgagaaaaagaacttgaagatttttattcatgattatgactatcatgccataggcatttttagttttcctgcaaattctttagtacacatctggtgcagactatattttccatagatggacactgctgtatcttgcatcccaaatattcttcttcagtgtaaccttgacatcccccttccaattggcgtaaaggtctgtgcccccttctcttgaacctgaaaggacatctgtgacttattcaacctatagaatacggcagaagtgattatgtgacttctgtggttagatcacaaaaacgtctcatacttctgccttactttctggggatgttccttctggaaacccagccaccatgttcctaggaagcctaacaagctctccatgggagagctcatgaggaaaggaaccaagcctccccaaacaacagtcagcaacagcttgcaaaccatgtgagggaactatcttgaaagtgggtcatgtagttcccaatcagaccatttcagctgataccacatggaacagagctgagcgatccctactgagctctgctcagattgtggatttgcaagcccaaccatgattgttgttttaatctactaaattttgggttggtttattatctggaaatagttattgtaactgtaatatgatttttattggtagcataacattggtagcataacatttttaagagacagggtctcactatatttccttggctggtcttgagctcctgggctcaagcaatcctcccaccttggcctcccaaagtgctgggattacaggtatgagacactgcacctagcctcatttaatcttacaacaagagatttaataattctcttaaacttgaatctctggagtgaacaaaatctctacggtattttctaaggtacatattccattgttttgcaatcacacctgagaggtcttaactgttatcatccaccacctctccctgtatatttactgtgttcccaaagaatattaatgtagaatgatccagactctcatagatgtggcccaagtctaacatatgctgttcaatctaaaaccggagtttgtaattggtgatcatatattttctggcaagatctccaatttttccatgcaagcactaatcctatctccatctaattctaaagcctcacacagcaaagtctctctgctcagtgagatcatccaacaccaattcctatcacatctcactggaaaatcccaaattgtgaatttcaaagatttcccacgtgtgatttaattaaccattcattccctgaggacacctcaagtggtggctttttttttctcccacagccttcgtaccactgtcatccttgtttctcattgttggtgtcagacaactgtctttccttctctaaaatcttttttttttttttttttttttaagcagaatatcactgttgcccaagctggagtgcagtggcatgatctcagctcactgcaacctctgcctcctgggttcaagtgattctcatgcctcagcctcccgagtagctgggattacaggtgcacaccaccgcacccggctagtttttgtattttttgtagggatggggtttcac[131 bp omitted]tcagtctataccatgtattatccctctctgttgcagtgatgtgttcacatgcaggtttttgcccctcaggaattttagctcctggctcagtatcactaactctaatactactaatctttattttcagtgatttcaaatgctgaaaacaaaacatcttcaaaacctatgattctatacctagctaaaatcctttaaaatgaaggtgaaatagttgatttttttaaaaaaaaaaagacaaacaaaagctgaaagaatttgtcaccagaacacctatgctacaaaaatgtaaaaggaaattcttcaggtggaaaaaaattgatactagataaaatcttcagtctatatagaagaataaagagtgttagaaatagtaaacataggggtaaatacataagctactcttttcatttaatactttctttaaaagataatcaactaaagaaagaaatatatgctttaagcaaatttagaaataaaatatatgacaataaaaaagatgggaaggggaaatagaagtatccagttgtgtctggcgcagtggctcaccccagtaagccactgcagggaggcaggattgcttaaggccaggagtttgagaccagcctgggtaacaaagcgagatcgcatctctacaaaaaaatttaaaacattagccaggggtggtggcacacaactgtagtcctagttacttggaaggctgaggcaggaggatcacttgagcctaggagttcgaggctgcaataagctatgatgacaccactggaatccagcctgggaaacagagcatgacccagtctctttaaaaaaaaaaaagagtacccaattgtaatatgtttacattatacctgaagtgttctaaaatgacttgaatagtgtaaagcacattgcaaaccttaacccctaaaacagcaaaacaaagagatatagcaaataatcctatagtgacgataaaattaaatactaaaaaaataagattaatccaagacgaggtaggaaaacaggaaaaaaaatttaaaaagaacagatgacaagatggtagagtaaaacctaactatattgctaattacattaaatttaagtggtcaaactacagtatattccctgatttattttatagagccagcattgccttgacactaaaacttaaaaattaattaaaaattaagatgaaataaagtcacttttacataataaaatctgagagaatgtgtcaccaaagacccaaactacaggaaacactaagggaagatcttcaggctaaagagaaatgatacaggatggaaactcagatcacaggaaggaaggaaaagcaactagacattttttcctgttttccaacacatataatttcttatctttgtaaattctttccacatttccaagtatttcttttttatttatttatttttttgaggcggagtttcgctcttttgaggctgtagtgcaatggcacaatctcggctcactgcaacctctgcctcccgggttcaagtgattcttctgcttcagcctcctgagtagttgggattacaagcatgtgccaccacgtctggctaattttgtatttttagtagagacggggtttctctgtgttggtcaggctggtatcgaactcccgacctcaggtgatccgcccgcttcagcctcccaaaatgcagggattacaggcatgagccaccgagcctagctatttccatgtatttctaattcatatattttaactctttttggtaggagcattcaaagctatgatttttccttagggtcctgctttttaatttaatttaatttttttgagatggagtcctgctttgtcgccaggctggagtgcagtggcaggatctcggctcactgcaatatcctccccgccgggttcaagtgattctcctgcctcagcctcccgagtagctgggattacagatgcgcaccacgacacccagctaatttttgtatttttagtagagatggggattc[131 bp omitted]ttcttgtttcaatatgcaatgctatcattgattactaaaaattctttacttttagattatatttcctctttgttcccatacttattaagacataatttataaacttttgataaaattagctttatttctctgattttattattaaattctagttgtatttcactatattcaggcaacattatcatttctaattactggatattactgtggcctcagattttgtcattttttagtgaatgttccacagccacttgaaagaatgaatattaacaattatcaggataccaaatttaatatatatatcaataatatagatctgatacagtatgtgatttagtacttctatttccttattaaattttgtctacttggcctggtttggactgagaagagtgaattaatgtctcttactgctggtaagtgtctatttcttctatctgctctaaattttactttaggaggtaatgctatgatattcaatatatattcagaactgttatatcttcattttgaaatttatactttaaaagtatataatgtctttctgccatgtttaattctgtgatgtggcctgaatcttacttagtctgttttctttattctgtctttttttgtagagacagggtcttgctatgttggcaaggctggtctaactcctgtcctaaagcaattctcccgccttggcctcccaaagtgctgggattatgggcataagctgccatgcccagtcctgttttcttttcattctatttgcctggtatagttgttcgcccatccttttcttaacctttctaaatcagtgaatcactcaggtgtctgggtttttctttgtaattcaatctgaaaggtcttttaatagatgagttaaaccccatttgcatatgttaataaggtatatatgtttgctctctggtcttaactttattatgtaattttttttttttttttttttttagacagagtcttgccttgtcacccaggctggagtgcagtggtgtgatcatagctcactgcagccgcaaactcctgggataaagtgatcctcccacttcagcctcagcctctcgagtagctaggactacaggtgcacacaaccacaagcagctgattaacacaaattttttttgtagaggtggagttttattatgttgcctagactggtctggaactcccagactccagcgattctcccacctcagcctctcaaagtgctagaattactggcgtgagtcaccgtgcctggcttttatcatgtgattattttgttaattctgtcttgctcactctctctgcatatatctgggaagtcttactatacataagttattttctgtctctcactaccagttaagcttcagaagggaagatatgtatgtatgtgatatttttttccccactgatttattccgttacctagaagaatgcctgtcacatagtaggtactcaataaatattcgttaatcacctcatcaaatcaaagttctgacaagagaaacactaatattttcttcaaaacaatattatttgtgttctctccttgtgtctgttaaaagatttcacgtaagggagatgaagaatcatttattcaacaagtatatgaacatgagttggagatgagaggagcaaaaatgaaggccctgaaattctggcaccgtcacttactcactagtaagttattgtataattcccaggtaagaaactatgtcagaataaataatgcaggccaggcgcaggggctcatgcctgtaatcccagcacttcgggaagctcagatgggcagatcacttgaggccaggagtttgagaccagcctggccaacttggcaaaaccccgtatctacttagagtacaaaaattagctgggtgtggtggcacgtgcctgttgtcccagctacttgggaggctgaagtgggagaatcgcctgaacctgggaggtggaggctgcagtgagccaagttcgcaccactgcactctaaccttcccacctgggagacagcgaggctatgtctcaaaaaaaaaaaaagcaaatagtcacatgccctatacaaaaaaaacaaaaacaaacaaacaaaaaatcaagtattgtaattaggagcaagaaaaaaccaacttacatgggccatgtcttattttagaattgaatgtattatttaatcctcttcttcgttccctctggaagaaactcaatccaaagaaggtgttgctgggagagaggggagttaaaaaaaagacaggagattattgcctctaagctcccaaaatgttaattcagaatgacatttttcttcccccttcatatctcctattcccagacctgatacatacatacataaattattagtgggaatttggacaaatcctagctttactcaaaaccatgaggaaactcagctacagcaggatagactcaagaaaagcaaggatcatgcccttcagcagaagggatagttaggccagcccattgtcccaatactatgatgaaatcgaagccaggatcagggtgctgagaactgcactgggtagattttcactgaattaagaggaaaaagaaaaggtaatgaacattatgagaaaagattagggaaacagaaaacagacccaaaagacccagtgtatgtgtaacagaaatttcaaaaatagaggctgaaacaacacagatggaagagaaaaaataaatagaacaaaaatttgcagaccaaaataaattcttgagtctttagtttgaagtacagtgctgtaagaattaaagaagaatcatacctggaaacatcctgaaaaatattcttaagtttgtctttgaatacagacaaaaggacataaatatcttttagtaagaagttgcagaggccgggcgcggtggctcacgcctgtaatcccaacactttgggaggcagatgcgggcggatcacgaggtcaggggctcaagaccagcctggccaacatggtgaaatcccgtctctactaaaaatacaaaaattagctgggtgtggtggcggatgcctgtaatcccagctactcgtgaggctgaggcaggagaactgcttaaaacccgaaggcggaggttgcagtgagccgagatcgcgccaccgcactccagccacggtgaaagagagaaacttcgtctcaaaaaaaaaaaaaaaaaaaggaagttgcagaacaatgtgtattgtggccaaatctcagaaaaaaaaaatcaaacacataggtacataagcatactacatatgtggtgtttttctgaggctgtaatgataaatgcggggtagcaatgtgattttcgcttgtgttgtgtgtgtaaatctacagctaactcctcaagtagtcaggaaaggatgagagatggatgaatgacagatctctggagtggggcgtcctgagccttagatgtgtgcacaggagcggggtgaggtgaatgtgcgtgtgtctgtgtgtgagagaccagagttgactgagaggagtggaagctctctgcctgatcgtgtgagcctgaggataacgtgaatgtttttttgtttttttttttttgagacagtttcgtttcactcttgttgcccaggttggagtgcaatggcgcgatctcggctcacagcaacctccgcctcccgggttcaagcgattctcctgcctcagcctcccaaggagctggaattacagacatgcaccaccatacccggctaattttgtatttttagtagaggtggggtttctccacgttggccaggctggtatcgaactcccgacatcagggcatccacccgcttcgggctcccaaaatgctgggattacaggggtgagccaccgctcccggcctgtaaatgtgctttttctttcacgtaaataaatgagatttacacaaatagccattcacaatcatggtcacagtcacctacaaaccccatttacacaaatgatcaggcacacaatcacactgtcactaaagcacacccacgcaccaggtcgctgtcccaacagtaacacacagcccaaagagaaaccctacttcctcacgcattcaaaacacacccacctaagggctgatcccgcactcagaggcctaaaactatagacattcccttccgcggcactggtgagccaggatttcttaccttcagcattctcagggaaggctctggtccaagctctgattcggattccaagcgaagccacacgcccagctcttccttctccaccggcccgggacatccttacctgcctctacccggagaccattcctgcgaggctcctaccggaagtagctgtggacagcagtgtcctctgggaaatgcagtccgaggggagagcgcctggggtggagcgggtgtgttccgccgggctccgggatgcacttgcgcagtttcacccgaggctggagtgacgccaacctgttaatgttcgttttcggattctggacttcgggttccgctgaggacggatttcggaataggcacagtggctgccccgaacccctcaaggcggcctccgcgggctgtggctgaagataattttcggcgggcgcggactaacccggcttccctttgtggagttgtggtgagaaaggtgttttgttgtgcgcgtgtccgaaggtgactccggaggagaaggtggatatgaactgacggtgagggtgtagcgcgtgagatttgtatgtgaaacgatttaaaaaaaaattttttttttggccgggcgcggtggctcacgccaaggcgggcggatcaccgagaccagcctgaccaacatggagaaaccccgtctctactaaaaatacaaaattagccgggcgtgatggcgcatgcctgtaatcccagctactcgggaggctgaggcaggagaatcgcttgaacccgggaggcagaggttgcggtgagccgaggtcgcgccattgcactccagcctgggcgacagagcaactccttctcaaacaaacaaacaaaactgtatgtcatatatttgactccatttatttatttatttagagacagagtcttcttgccctgttgcccgggcaagaaaaaacaaacaacaacaacaacaaaaaactgtacgtcatatatttcactcaactttttttttttctttttttttttttgagacggagtctcgctgtcgcccaggctggagtgcagtggcgcaatctcggctcactgcaagctccgcctcccgggttcacgccattctcctgcctcagcctcccgagtagctgggactacaggcgcccgccacctcgcccggctaattttttgtatttttagtagagacggggtttcatcgtgttagccaggatggtctcgatctcctgacctcgtgattcgcccgcctcggcctcccaaagtgctggattacaggcgtgagccaccgcgcccggcctctttttgagacagggtcttcatgccctgttgcccaggctgactgcggtggcgcgatcctagctcactgcagtctccacctcctcagctcctcccgcatccacctcccaaagtgctgggatagcaggcgtgagccaccgggtcaggccaaaacgatttattttatttttatttttttggtaaagacagggtctcgctatgttgcccaggctggtggtctcgaactcctgggctcaagcgatcctcccgtctcagtggccaaagtattggatgacaggtgtgagccaccgcgctgggtggtgaaacggttttgaggctttttgagaatggctgttctatatgcccgcgtggggctcatgcggcgagcgccgccactcccgcagtggcccctgtgggggtgatacgtgatgtggcttaaatgtgagaggccacctggacccgtgtgattgccacgtttgcaggagcgcagccacgtgcacagggatcttgtgacattctgtgtgaggctttttgcgctgggtccacccatgattagaggactagtgtgactgtggcggcccctgagaagggaagaagctggttgcgaccaggaaggtctgagatggatgaatgacagatctctggaccagggcgtcctgaaccttagatgtatgcataggagcggtgtgaggtgactgtgtatgtttgtgtgtgagagtccagagccgacttagaggagtggaagctggcacatgttatctgccagaagggacagatccatggtaaggatttttaaccttgctgagagaccagtaactccatcaccaagtgtaatatgaggaaatggtgcttgtttgagaacaagtgattctgcttgtgtctgattctcattcatgtatgtgagatggtttgcacttgaaactgtcagtgagagagaaagtagagtgaaatatatgacgtacagctggccctccctatccatgggtcttgcattgtggattcaacaaaccttcagttgaaaatatctgggaaaagaagttgatgtttgcatctgtactgaacttgtacaggctttttttcttgtcattatgccctaaaaaatagaatataacaactatgtacatagtatttacatggttattaggtgttataagtaatctagagagggtttaaagaatatgggaggatttccatagattatatgcaaataccgtgttcattttatataagggacttgagcatctgtgtatgttggtggggaggggtcctggagggacactgagggatgactatgtgaaagtggtttgcgaatatgctcaagtctctggatgaattgtatgacagtgaaggggtatgtgattagactgttgtggctttgaggttgatgtgtatgttttaaaggattatgattgagttggagatcatgtgagatttggtgtgtttaaatgtgacatgaattaaaatccgaatgaaagattgcgaagttatatgaatgtagtaactacataagagaatgcaggtatctgggacccatggatacgttacagtggggaaaataaataatcagacctttcagggattacttttcagggtagtttggtggcagcactttgtataaggaaggcaaatccatatccatagtgtctatttcagtgagaaaaaagcagtccgatgtaaccaacctgccaccagagaatggtgtcatgttgggactcagtgttggtctctgcacagtcactctaataaaagccgtaggtcccttttggaagactgggagaaagattaacagtataaatttctggaagtatactggtgctcttccttaaggggacctggcctcccctttgttcaagggcttctgggtctcttcactggctcaagtctgggtattcattgagggacactgactttctgtctttatgaatcaagttatacttttgttcacttgacctagaagtcttccacttacacaaatcaattaactctttagtagatttcctatctatttaacttccatcaaagaatatcagccatcttcccagacagttaccctgtaacagatattttctttgaaatgttctttcatggccattttgcattctttatcacaataaattattgtttcatttttattaaattgttttaaattagacactggctctgaactgacctcaattccaggagatccaaaacatcactgtgatctaccagtcagagtaggggcttatggcagttaggtgatgaatggagttttagctcaggtctgtctcacaatgggcacagcaagtcccagaagcattctgtggttgtatccccaataccatacacataattggactaaatctacttagtaaccggcagaatccccacattgattacctgacctgtggactgagggctgttatggtgggagaggccaggtggaagcgactaaaactgtctccacctagaaaaatagtaattttttttactatttttgtaaatagtaaaaatttactatttacaaaataatagtaatggattcccaccccatcaccattcaacttgcctatttggccctgcagaagacaaatgggtcttgaagaatgacactggattatcataagcttaaccaggtggtgactccagttgtagctgctgtaccaaatgtggttttgttgcttaaggatattaacacatcctctgctacctgatgtgtagctactgaattggcaaatgcttttttctccatccttgttatttaaaaccaccataaatagcttgctttcaattggtaaggccagtaatacgctttcactgtgctgcctcaggagtatatcagctctccagacacatatcgtaagttagttcacagggatctcgattgccttttccttccacgagatactgcactgggccgggcgtggtggctcacacctgtaatcccagcactttgggaggccaaggcatgtggatcatctgaggtcagcagttccagaccagcctggccaacatggcaaaaccccgtctctactaaaaatacaaaaattagctgaacatggtggcatgcacctgtaatcccagctactcgggaggctgaggcaggagaattgcttgaacccaggaggcagaggttgcagtgagctgagatcgcaccactgcactccagcctgggcgacagagcaagactccgtctcaaaacaaacaaacaaacaaataaacaaaagatactgcactgatccattacattgatgacattacactgattcaacctagtgaacaagaagtagcaagtactctagatttattgttaagacattgcatgtcagaggatggaaataaacccaacaagaaatcaggggccttctacctcactgaaattcccagaggtcgggtggtgtggagcatggtgagatatcccttctaagatgaagtataaattgttccatctggctcctcctacagtcaaaaaggaggcacaatgcaaagggggtctcttcggattttggaagcaacgcattcctcacttggatgtgttattctgctggccatttaccaagtgatccaaaaaactgttagtttacagcggggcccagaacaaaggaaaactccccaacaggaccaggctgctgtgcaagctgatgtgccacttgggccacatgatccaacaaatctaatggtgcctcaagtgtcagtagcagagagggatgccgtttggagcctttggcagggcccagcagaggaatcacagtgcaggccctgaggattttggagcaaagccctatcttcctttttagaaaacgactcttcagaggcagcttttggcctcctactggaccttagtagagactgaacatttaatcatgggccacgaagttaccatgcaacctgcactacccatcaggaaatgggtgttacctgacccaccaagtcattaaattgagtgtacacagcagtactccatcataaaatttaagtggtataaatgtgatcaggcctaagcaggccctgaaggcacacatgtgaagaagtggcccaaaagcccatcgtcccccctcttgctacaatacctttctctcccagcctgcactcgtggcctcatggggagttccctatgatcagttgatagaggtagagaagactcaggcctggtttacagatggttctgcatgatagacagataccacctggacagcgctacagtcctgttctgggacatccccaaagaacagtggtgaagggaaatcctcccagtgattggaactctgagcaccgcacctggttgttcatttttcctagaaggagaaatagccagatgtgacattatataccaactcatgcactgtagccaatggtctggctggatggtcaggaacttggaaggaacattatttaaaaactggtgacaaggaattctagggaagagatatggacctcgctgaacaggtaaaaaatataaagatatttgtgccctatgtgaatacttaccaaagggtaaccttagcagaggatgtttcataatcgggtgtataggatgacccattctgtggatatcagtcagcctctttaccaagctacccttatcatcacccaattggctcatgaacaaagtggtcatgatggcagtgatgaaagttatgcatgggctcagcaacatggacttctgctcaccaaagccaaactggctacagctactgctgagtgcccagtctgctggcagccaagaccaacattggctccccaatatggcaccattccctggtggcaggctgatacattggattgcttccatcatggaaggggtagtatttttttcttactggaatacacactttagatacaaatttgccttcctgacacaaaatgcttctgccaaaactaccatccagacccttaacgaatgaaggtttgggtcaccccaccagttaaagaaccacaatcagctgaggagctcgcttgctgagggaaaaaggaatacataatggataatggaagaaggtaggtatgaataccagctataaccacgtgagcagttacagaaacaaagactaattgtcatgaatgtgtcttctttattttataatgaatgtgtatacaacacagctttgttttcatccctttcatatctctttatcatgtacagtatgatatactgactttatattagagtatttaaatattgttaactttatatcagtttttaagttatgggatatcagggagaagcattaacatcatccagactttgcatcctcttctggggaagtgttagttatttttggttttatgcaggatagttgtatcatgttaagcagaagtataaccttgttactgcctttattcagatatgaagtatggttttaggagatgcttatgggtaccaagtcgacaagggtggacttatgatggttaattttatgtgtcaacttgactgggccatgatgcccagatatttggtcaaacattattctggatgtttctgtgaaaggtgtttttttggatgagagtaacacttaaatcagtggactctgaataaagcagattacgctccacacaatggatgagcctcattcaatcagctaaagttcttaatagtacaaaggctaatgtctgagcaagagggaattgtgttagcagactgcctttagacttcgaatcacaactgttttctgggtcttcagcctgctggcctgccttgcagattttggacgtaccaaggctccacaattgcatgagccagttccttaaaataaatctttctgtgtgcatgcatacacacagacacagacacagacacacacacacacacacaccctgtttgttctgtttctctagagaaccttaatatactatcctaagtattttacatgtatagtgtcatttaactcccctcagaaccctgagggagttattgatacctttcccggtaaactgatgatgcaggtgaggcatcaagagcttaaataacttgtaaaatgtcacagagttcctaagagaaggaactggaatttgaatttcaaagtcctcagtctttaactattagattaccattttctaacttgacaccttctattctatatcccacccgcttcacaaagccattcctgatgagtgccaactaatttggaatgaaaatcattaggattatgggttctattatatgatatttaacacactgtttattctcaaacatttttatttactaattattatcaggaattcttcaatggcattcttgtaatactatttagttcatttttataattacttcctaagagacaaattgtcctagaagtggggggtttctgagtaagacactggcatgcctggcaacatgcaagaccttgtgcttcaatacttggaagaagcacaaattactaagatataattgctgcttttgtattgcttataattcaacaggggaaataaaagtaagtcaaaggtagagcatgacaaagacttctagagaagtacaggtgataaccctgggagttcccaagaattcataggagctctgggtgtgaatgaatgtcctctcgtcatgtgtatgccttacagattagagtctgttgatgttgggtctaaagggtactaatggagcaaggctgtcctcttactgatagcagggcattatggctaatatttcggaagtgaaataaatccttctgtcaagaaggcatagaaaacaaagcagcaagtccaaggtaaggtttaaacctcctagctcttcttccctgggcagaatacccacagtcatagttgggtccaaattaatattttttttaacataagagaaataattcatcacatagtatttagaatatgcttagctgtaaatctaaagacttcttaaagcttttttttttggagacagagtctcactctgttgcccaggctggagtgcagtggcatgatctctgctcactgcaacttcttcctcctgggctcaagcgattctcgtgccccagccacccaagtaactgggattacaggcatgcaccaacatgcctggctaatttttgtatttttagtagagatgggtttcaccatgttggccaggctagtctcaaactcctggcctcaagtgatcagtccacctcagcctcccaaagtggagggattataggcgtgagccactgcagccggcctaaaagcttttttaatctactttttgaaaatcttccatttaataaaatgccttaaacatacattctaaaatcaacagatgtttcttgcaaagaaaatagcaagtatatgtaacaagtatacttaagtttaaatttataaaagtatatttaaaacaaaaaatcagtatcacagcctattaaatgttaaatgttaaaggtataccttggctgggtgtggtggctcacacatgtaataccagtactttgggaggctgaagcaggaggattgcttgagcccaaggagttggagaccactctgggaaacagaatgtgaccccatctctacaaaaaataaaaaattggccaggcgcagtggctcacgcttgtaatcccagcactttgggaggctgaggcagacagatcacaaggtcaggagttcaaaaccagcctgatcaacatcgtgaaaccctgtctctactaaaaatacaaaaattagctgggcgtggtggcgtgcacctgtaatcccagctactcaggaggctgaggcaggagaatcacttgaacccgggaggcggaggttgcagtgagccgagattgcaccacttcactccagcctgggtgacagagcgagactccgtctcaaaaaaataataaaaaataataataaattagccaggtgtggtggcatgtgcctgtggtcccagctacacaggaggctgaggcaggaggatcagttgagcccagcaggtcaaggctgcagtgagccatgttcacgctgctgcactccagactgggtgacagagcaagactctgtctcaaacaaaaacaaaaacacccagtatacctctatagatatttttatttctattgctgatgtctggcattctatttgtatgtatatgtacatgtatctgtatgtacatatgtacactttgataaatggcatagctgtacatataataacctactgtagccactgtcagcatgttttggatttgtctatatttttctattattctacacctttttttttttttttttttttttttttttgagacagagtctcactctgttgcccagggtggagtgcagtggcaccatcttggctcactgcaacctctgcctcctgggtcaagcgattatcctgcctcagcctcccgagtagctgggattacaggcacctgccaccatgcctggctaatttttgtatttttagttgagacggggtttcaccatattggccaggctggtctcgaacctctgacctcaagtgatctgcccgcctcaacctcccgaagtgctgggattacaggtgtgagccactgcacccaaccaacttttttttttttttaactgatcacttaacagttcgttctgaggaagttctggaatttttaaactagtatattcctgctagactcaaagctgaaccatgccagagaaattccttccatatgctgcccagctgctatgtataccccaccctcccatttccctcagggtcctgtgggacttactttcagtggcaaaaagcgtaattacttttgcaccaacctaatagatttggagtgtttttgtcatttgcaggactgtcacttcgagggataaccatcaagttctccaggtgcagagtgagtggctgaaccctgcttaaagggatgtaactataaggatgtgatgtcagagcctagtcttgctagttaagaataatttcggtggctcgcgcttgtaatcccagcactttggaaggccaaggttgggggatcgcttgagcccaggagctcgataccagcctgggcaacatggtgaaacttcatctctatttataaaagtaaaagatagggccgggcgcggtggctcatgcctgtaatcccagcactttgggaggccgaggtgggcagatcacctgaggtcagaagttcgagactagcctgaccaacatggagaaaccctgtctctactaaaaatacaaaattagctgggtatgatggtgcatgcctgtaatcccagctacttgggaggctgaggcaggagaatcgcatgaacctgggaggcagaggttgtggtgagccaagaccatgccattgcactctagcctgggcaaca[141 bp omitted]gaaaccctgtctctactaaaaatacaaaaaattagcccagtgttgaggcgggcacctgtaatcccagctactcgggaggctgaggcaggagaattgcttgaacttgggaggcagaggttgcagtgagctgagatcatgccactgcattccagcctgggcaacagtgcgagactctgtctcaaaaaaaaaaaaaaaaaaaaaaaaaaggccaggcatggtggttcatgcctttaatcccagcactttgggaggccgaggcgggtggatcacctgaggtgaggagttcgagaccagcatggccaacatgtcgaaaccccatctctactaaaaatacaaaagttagccaggcatggtggtgcgcgcctgtagtcccagctacttgggaggctgaggcagaagaatcgcttgaacccaggaggtggagtttgcagtgagctgagatcatgccactgcactccaatctgggcaacagagtgagactccaactcaaaaaaataaataaaataaaaatttttaaagaatattttcctttattatttataatctgcttgctgggagtattttctttcattgtgagtctcttgagagccttggaagaactgatctgacatttttatagctgcaaacactcaactgtgtttttattattgaggcttcattttcttgacacctaaagtgactttatcttcctctgtctcatattttcctctccctgaattgacatcaccacaacaggcctaagtccaatttcttttcctatatacaggaccttttatctctaagccagatgtgatttccccattgaagaaaaggagatagccgtgaatgtgtggagagtaatgtgttaaggtggctcaaagaagagggaagccattgcagataaatgctcagctgatatgaagagtcaaaacttcaaggtattgtttgagaaacttttccctcagtggccagtggagagaactgaggtcccttcagtctgagttcccaaagacacctcaccatcatgcctctgtgtcagtgtgcccatagctccttctataattcttccagttttaaggagggaaggattagccttatagagtttctaattataaaagaaatacacactgagcattaaaattaagaaaacagagaatcctattccacatagcaaaggaaacaataggatgaagagacaacccaaagattaggagaaaatacttgcaaatcatatattggataaggggctaatattcaaaatgtaaaaggaactcacacttcttaataacaagaatacaaataactggccgggtgcggtggctcacgcctgtaatctcagcactctgggaggccaaggtgggtggatcatgaggtcaggagattgagaccatccttggggttaggtgaaaccccatctctactaaaaaatacaaaaaattcgccaggcgtagtggtgggtgcctgtagtcccagctactcaggaggctgaggcaggagaatggtgtgaacctgggaggcggagcttgcagtgagccgagatcgcccactgcactccagcactccagcctaggtgacagagtgagactctgtctcaaaaaaaaaaaaagaatacaaataaccctattaaaaatgggcaaaggacttgtatacatttctcaaaagaagacatacaaatggccagcacatatacgaaaaatgctaaac[140 bp omitted]tggtgaaaccccgtctctaataaaaatacaaaaaattaaccaggcatggtggtacgcacctgtcgtcccagatacttgggaggctgaggcaggagaatcgcttgaacccaggaggtggagattgcagtgagccgagattgcatcactgcactccagcctgggcgacagcgcgagactccatcccccccaaaaaaaccacagtgagatattaccgtgcacctgttagacacctgctattacaaacaaagatgaaaggttagtgttggtgaggatgtagagaaaaggaacactgttgcgagcactgtaaattactacagccattttgggaaacagtgtagagcttcctcaaaaaacaaaaaatagaattaccatatgagccagcaaccccacaaggaattgacatcagtatgtcaaagatgtctgcactcccatgttaactgtagcattattcacaataactaagatatggaaacaagctaagtgtccatcaatggatgaatggattttttaaatggaggatatatacacagtggaatactattcagccttaaacatgaaattctgtcatttgcaacaacatgggtatacctagaggatattatgttaagtgaaataagccagacacagagagacaaatactgtatgatctcacttacatgtggaatctaaaaagttgaactcttagaagtagagagtaggagggtggttaccaaaggttggggggtggggatgtggtggatggggaaaggggaaatgctggttaacaggtacaaagttttgtttagataggaagaatacattctgctgttcttttgtccaacacagtgactatagttactgtattgtatatttcaaaatagctaaaagataggattttatatgttcttaccacaaagaaatggtaaatatttgaggtaacggatatgctaaccagcctgatttgatcattccatcatgtattgatgcatacaaatatcacattgtaccatataaattatacaattattgtacaaatatatacatcaatatacaattgtacatacaatacatacaattgttgtacaaatatatacaattattacttgtcaattaaaaattttaaaaaagaaatctgaaataacagttgccccctatgagcatctcacgataaatccctttaatctcctctacatatactgagtattaaaaaacagaatcgtctagaacattgttgctgttctgagacctgtctttctcatttaacacaagtgaacatttttctttgtcagcaagtagcggtaaacatcatccattctaatggctgtattttttaataggtggagttgtatcttcagggcagattcctaacagtggaatggctgggtcacaagggaaatgtgtaggtagtttttgtacatgttgtcaaatttcccaccataagggttgtgccggtttgttttcccaccatcagtgtatgagactgcctgattccctgtacattcattcctgtggctgctctaacaagttaccacaaacttggtagctttaaacaatagtttactctctcacattctggaggccagaactccaaaaatctagacatcagcagggctggagcgctcctagagattctaggggagaagcctcactttgcctctttttctggtggctgtagccattccttgaccattccttgacattcctggccccatcactgagatttccacctccggggtcacattgctgcctcttcttcctctgtctgccagtctccttgtgtctcttttaaggttgcttgtcactggatttaggacccaacccacccagacaatccaggatgaactactcatctcaaacttcttaatttaatttcatctgcaaagaccctctttccaaattaagtaacattcacagtttccagagattaggacatggacatatctttttgcagggtcatcagtcagccgactatatcctgtctcaccaacagaatacattgttatattttttaatttttgtcatcttgataggttaaaaatggtctcagtattccccctctccccctgccaagagacagggtcttgcttgttgtccaggctagagtgcagtggtgcaatcatagctcactgtaatctcaacctcctggcctcaagcaatccttccacctcaggctcccaaagcactgggattacaggtgtaagccacctcacctggcctgtctccatattattttaatttgtatttctctttttacacatttaagggtcccttttacatattttttgtgaattgttaatttctcttacccatcttttctgtcaggtttttgggtctttcccttgacattaagaggagttttgtttctttgagacaaggtctcacgctgatgcccaggctggagtgcagtggtgcaatcacggctcactacagccttgacttccagggctcaagtgattctcccacctcagcctcccaagtatctgggactacaggcacacaaccacacccagctaattttttgtatttttttgtagaaatggagtttcaccatgttgcccagcctggtcttgaactcctgggctcaagcgattggcccaccttgtcctcccaaagtgctgagattacaaggtgtgagccactgcacctggccaagttttcttttttttttttttaattgggaattgttatagactgatttgttcccccccagttcatatgtttaatattattaactatagtcatcatgttacacaacagaacaccaaaacttattcctctcatataactgaaactttgtatatactgatcaacctaactcctaatttctagtagtataagacttaagacatacaaccagatatatgtagagagagtgaacaagagggaagtaacaaaataattacatgataaagggtgggtgctatggctcacacttgtcatcccagcactttcagaggctgagagacagggggatcacttgaggccaggaattcaagatcagcccggggaacatagtgagaccccatctctataaattttttaaattgtctgggtgtggtggtggtatgcacctgtagtcctagctacttggggagctgaggctgaggtgggaggattgtttgagtctaggagtttgaggtggcagtgagctatgatagtgtcactgtcactctagcctggagtacagaatgagaccctgtctcaaaaaaaaaaaaaaaaaaaggttaaattacaagctactactatgtacagcaacatggatataatgttatctatatgtatctatatacttagaaataatgttgagcaaaggaggtcagacacaagagtacatactatatgattccacctatatgaagttcaaaaccaaaccaaactattctattatagaggtcaaactaatggttaactttgaggtataatgattgggaagagatatgagggagccttctgggatgttggaaagtttctatgtctgtaatggcggttgcatgggttttttttttattattttattattattattattattattttttttttttgagacggagtctcactctgccgcccaagctggggagcagcggcaccatcttggctcactgcaagctccacctcccaggttcacgccattctcctccctcagcctcccgagtagctgggactacaggtgccctccaccacgcccagctaattttttgtatttttagtagagacagggtttca[140 bp omitted]aatttgtgcttcctctctctctctttgtgtgtgtgtgtgtctgtgtgtgtgtgatttcatgtgttcatttcttttactcactttttctatcgggtttttgggtctttccctcgattttaagagttttttgtttttgtttttttgaggcatggtctcactccaacgctcaggttggagtgcattggcacaatcacggctcactacagcctcaatatccttgggctcaggtgatcctcccatctcagcctcccaagtagctaggactacaggtgcaccaccacacccagctaattttttgtatttttagtagatacggggtttcaccatattgcccaggctggtctcaaactcctgggctcaagtgttccacccgtctcagcctccgaaagtgctgggattacaggggtgagctatacaccctcaaaataaatggcatatctgcatttttaaatcacatttttctacctacaaaaccaattttctttcagttctggtttttgtttctgaagcccatattttattacactgaatgaaacctgtgcatgggtaattcatttaaataaatat[135 bp omitted]tggtgaaaccccgtctctactaaaaaccaaaaattagccatgcgtggtgacatgcgccttgtagtcccagctacttgggaggctgaggtgggggaattgctggaaccttggaggcgggggttgcagtaagccgagatcatgccactgcactctagcctggcaacaagagtgagactctgtctcaaataataataataataaaataaaataataataaaagactaatgataccatatagtagcgaatagacattctcatagtatgttgaatattggtgcaaacttaatcagggcaattgatatagatgtgtaaacaggttttaactatgaaaacctcattctcagcaaaatatctaagactatccaaaatatacaattcacatgtgcacagaaaaggcatatgcagtaaaacattgcatataatgggaaaaagctggaaagaacttacatatacaaacagaacagtgcagccattaaaagattatgacacagttcataatttagtgacatgaaaatttgttcactatattttgttagaagaaacaagtagatttcaaaacaattgttatataaccctgttttgaatgaaaaagtcctataagcctatatccatgcacttattcacaaatgaggtgaagtgatttggaataaagtgttcaaagtgctttactttaagctttttttaatattctccaatcttctgaattaagaatctactaattttacaatgagagaaatctgctttgagagcagaaaaaataataataaaaggagatatgtgtatgatacatggaatgcaatgttgaaatggtctgaattctggctgaagagacccaaactttcttcatagacattccagagcactaattcaaatactgccttaaaggtcctaaatctagaatcctaagattttatacacaacgagttcctcttatcagttgcctctcatttacctgggcacagaactgctgttaaccaacctcttcacgaactattgctccaagaaggaaatcacatctggtttggacataaattaatagggtaattaataataaacccttcacataggcaaagaaatggaattttggtctgatgtggctatggagaattgagaccattccttaatcatcaagcagaaagaagtcaagaaagtattctgaaggattaggatgataacactttagaaataacacaggagagacgcccatttccaactctaggaatcttaaaccagtccttcagaaagttacctaagaaccctgaagtttccctaatcaatcagggtgaagaaagtaagatgttcccagaatacagaatttgaactggaaaggggaaaacagatgtaaaaagggagacccggctggccgaggtggctcatgcctgtaatcccaacactttgggagactgaggcaggcagatcacgtgaggtcaggagtttgagaccagcctggccaacttggcgaaaccccatgtctactaaaaatacaaaaattatccggacatggtggtgggcacctgtagtctcagctactcggaaggctgaggcaggagaatcccttgaacctgggaggcggaggttgcagtaagtcgagatcacgccactgcactccagcctgggcgacagagcaagactcggtctcaaaacaaaaaaaggggagaccaaattggctagttaaataaatgtatgtaggtgttatatcacacccctgaataattcctccgaatcggggtgggggtgtcagtcatctgtactccacccagaagtcaatgccacattcctgagtctacatacccgtgaaatgataggaacccatgtgcccataaggtcctggaggggaatgcaaagttggtcaagacatgggagctagacagcaaggaaaaggaattgcaaagggaagttagtagttaaataagttaccacatatccatgtaatataatactaagatagacaaatgcaaagttgtagaaaatagttaaggaatattttcaagatactgtatcagagaaatcactttacaaaacaggttgaacaatacaattatatcaatatggtcatttaaaaagtctagaaagttaaacacctgtttcagttatttattgctatataaccacctcaaaagtttatggcttaaaacaaaaaacaattagcttattatttggggggcttggcaatttgggcttggcttgcctgagtggttcttctgctgatcatattcatgtgacagctgtcagctgttggcctggtggaggctggatggttcaagatggtctccctgaaatttctggccgttgttgctcactggacctctctctccaagtgatctttaatgcgcaagcaagttgctcttagccttcagtcatggtggtctcagggcaggaaaaggggaagagaaaaagctgcaagacttcctgaagctttgtctcagaagtctcacaatatcacttccaccacattctattggtcaaagcacctcacaaggccctgcctaatagtaacctaaccactgactagcatttcaggaggagaaaaaatactcccttgctgaaaaacaaaatcaaagagaacaaaaatagaaaatacaacaaaacttccttgaccttggttttcagatatgctcagcaatggttccctttcctcagggctcttagagaacctcaaggcaagggagaaggggtaaggaatcatgagacatcagacctttcttggaacccagattggctaaattggaaaaaattattgccaccacacgagctctcatcatctaccataaacatactcagatggaagtaaaagggagatgggagtactgctaacccttcttagtattcaagggaaaggccagggtcactgatatccaggactggggactttctcaaaattcacgttaagtctcctgcggagacagctctgggaatgatgtggatcacatggaacctgacctctgagagttcccaagggagagcctctgaggaaggaatcctactcctaggttctccccacgacgtcttcccagaactctgcttaagggacacttacaactcgaaaagcctcgttccgaaaacaggtctgtcctttttctgtttgcagattttattccaccactcgattatcccttccctttttgatggccatttcactgcagctggggtctatacagctataaagcgggagaaaaaaggaagctgggaactcagagatgcagagcccaagaaacaatcgagtctaaaactgccgcttaggtgggcactccgccaggatcccctgtgtcaaacaccaggctgagaactggggacaggtgtgccctgagaagacaacgcgggccatgcttcattgcaagatgactctgcttaacataggcatggatcatagtcctcacaggcacattggggagatcttcgacagacccctcagtcccaacattaaacacagcactgcagaaatgaagctttacccgttacacacacaacaccacagacctaaaaggctcttccatcacacggccacagcagcactgtcatgatggaaggtctcaaaccctacagtgtcacacacccgacagccgaccacggccacccaaaggtcccgcatccgagcagggacaggaacacaatcacgcacctgtcgcagcctcctcgccgcgcacaccgccgccttgtcctggcatcaaacacacacgcacaggtgcatacacaggcccgagctacggccctgcacaccctgtctgcgtcccgggagctcggggcttcctcaccgtgagcgccgccctcatcccagccacgcactatgagaatttggaaggggaaccagagatcaaagttcgaaaaccgcccgggcgcctgtgggaaatgtagtccaaggccggaaacgcccggatgtggagaaggcgcgcgtagccggtggacagcaggaacgcgccgcggagacacctgggaggcatcgtccgcgtgggagtgcgcatgcgcagacgcccggccggcaaccgaaggtgaggctggtgggtcccgcgggcgcggagaaggcgggtgacggtgtgacccgtaaggaaggctgaggagggaggcgggagcctgggctggggaaagcaagaagggaagaggagcaacctgggacgaggagttggctggaggaaagtgcgagtccgggcctcagagaaggctgggagggaagcaggaaccagagcgcgggcccgggagcacctgaagaagggaaccggttgcccgaggcggggggtgagctccccagtggcaggaatttcgtctgattttcgtcccctggctcctggagcacggcctggcacacaacaggcgctccgtgtgtgtgtgtgtggcttttcgtacctgtcctgtgtgttgtggtaggggaatgtgttattctgtgtgacgttgtggaaccggttgtttatgaaagtgatagggtccctgcgtgtcttaagttttaatttaaattagatgcgagtcgatttgtgtttgagcctgtgtccgactctggagaggcgacagtgagggcattgtgagtgaaaggttgttactttttgtagaagttctgtgaaattgtgcacgacgtgggggcctatgggattatgactatgtagtgggtgatacagctatgaatatgcctaattttaaaagtatttggtgtacacgacctatgatgactgtgaatgtggcacactgtgtgacttaggtggagtgcttgagaaaccgagtgttgactaaagtatgcattgtttagattgatttatgagtattgggcattttatatatgcctgtagaatttgactctggtaattagacaagtaaaataagtagtgattttttttttttaatggagagg[135 bp omitted]taacatggtgaaaccccgtctctactaaaaatacaaaaaattaaccgggcgtggtggcgggcgcctgtagtcccagctacttgggaggctgagtcaggagaatggcgtgaacccgggaggcggagcttgcagtgagccgagatcgtgccactgcaatccagcctgggtggcagagcaagactccgtctcaaaaaaaaaaaaaagattgggcccatgcgcggtggctcacgcctgcaatcccagcactttgggaggctggggcggacagatcacctgaggtcaggagtttgaccagcatggtgaaaccccgtctctactaaaaaatataaaaattagctgggcatgatggcgcatgcctgtagccccagctactcgggagctgaggcaggggaatcgcttgaactcggaggtggaagttgcagtgagccaagatcgcgccactgcactccagcctgggcgacagaacgagactccgtcccttcccttccaaaaaagatcatttattgggaaacctggtattgactgatgactgatatgcttaaatgaatagaataccactgggaccacacagaaaaaaactttatctcataactgccactctcaaaattcctatttgagagtgtgtgtgtgtgtgtgtgtgtgtgtgtgtgtgtgtgtatttatttttttttttgctggatgaatttcttctgctggaagcctgaaatgtgaaaggatacatgattagtttcttctctaattccccaacctttattttgtctcctctttactccctataggcagtctttagctctcatggattgggagctgggaaaggaatgagaagacagaagtcagagacaagaagaggctaacatgactgataccactataatttagtgtaagtcatctcttaccttccaagagaacctgctgcttggaacctccagatacacttcccttctcatgggcatagcctcttctccagctgctgccccagtgcttcctctgggcattcagtggcccaccgactctggtgggtgggtttgtccagtcattcctctttgataggacccaagacaacccagacagcctccacccatggggtcttcacctagtgctaaggtgagaattagccacctcagtcactttgccctcccaaatcttagaaatatgtaaaatttttgccaagaattctctcaccactttggttcctggtggcctcagggtctgagggaccccttgtgtgttgtaaaaaagggagaatcactcacgtttttccccctggaaaaacactgttctaaaaataacagtctcttaaaaatacatgctcctctctcagcctctccactgtctttaaaggaggagtttaatgatagcaaaattttacactcaacagctctataagatcctgttcttgaatgaagttctcttagaattttgtttcatttgctatctttgggatatcagctgaggctgaggcagaaatatttctaagttttcatcctattaaaaattgaacagtgataacaattagaaaactcagggttgttggaaaaaacattaacaaataaatagggggtgtgtgtgtatgtggaaagtatggggaaaaagacttatttacagtggtcatcaaaaataagagatacaaaggaagtgactttactaattacatgatatgttattaaagagcacattttaaaataggacttttggtggggcttggtggctcatacctgtaatcccagcactttgggaggctgaggtgtgtgcactgcttgagtccaggagttcaagaccagcctgggcaacttagtgaaaccctgtctctacaaaaatacaaaaattagccaggcgtagtggcacgcccctgtggctagctactcaggagactgaggtgggaggatcacctgagcccagggaggtcgaggctgcagtgagccgtgatcacaccactgcactccagcctgggcaacagagtgagactttgtttcaaaacaaaacaaaagaaactataaaactcttaggaaaaaacacataggcatacatcttaatgatcttaaatttggcatgcattcttttggagtttctttcatggtgattgaaatgttctaaaattaggttgtggatgattgttcattatgatggtttgtgaatataccaacaaccattgaatcgtatactttagatggatgaattttatggtgtgtaaattatatctcaatgctgtcatttaaaaaatcttggctaggccacctctgcaatgtgtaacactgagcaagccatgagtgtctcctgtgttagtcatgttagtcaatttcaggtataataggacctacctcactcagggtttttgtgagggtcattggatctacatcacagggaattattttggaaagtgtaaagaaataattgaattccaaatatccaagagaaggaaactggttggattaaccaagtacagtgccactgaggagtattatgcagccatgaaaagggatcagttgcatggatttatggagaagggcctccaggatactttggatttttttgttttcttgttttgtttgtttgtttctgagacaaggtctccctccgttgcccaggctggagtgcagtggcttgatcatggctcactgcagcctcgatctccctgggctcaggtgatcctcccacctcagcctcccaagtagctgggactacaggcatgtacaaccatacctggctaattttattttattttatttttgtacagttgggggtcttgctatgtttcctaggctgttcttgaactcctaggctcaagtgatctgcccaccttggcctcctcaggtgctgggattataggtgtgagctaccttgcctggcctccaggatactttgttagtgacaaaagcaaccgaatattatattctatcttttatctaagctttcagcttatcctttcattattttaatataagcaaatgtatatatttggatttttttaaactcatgtcaccaccatcacccaaatttaaaaagaaaacaaaaacagaacacttctagcccccatccaatcaccctggcacagaagtaacctctgttgtaatttcatctcatataaaaggagtcatgcagaatgtagccttttgagtctggcttcattcagtaaggatgttgcaattagtaaactgtagctgggactacaagtacatgccatcatgctggctaatttgtgtatttttattttgcagagacagagtctcactatgttgcccaggctggtctcgaactcctgagctcatgcaatcctcctgccttgtcttcccaaagtgctgggattacaggcatgagctcagttcagttgcatgttgcaattcactcatattattgcatgtatcattgcttcattcttcttagtataaagtagtattccattgtctggatggatcacagttggtttgtctgtgtatccattgatgcacacttgggttgtttccagttctgaggtggttatgaataaaactgctacgaacattcacattcgggtctttttgtagatacatgtctttgtttgtcatggatagatactcaggagtggtattgatgggtcgtttaaacaattactttaaaatggtatctttacatggaatagttttgcctcttgattgtggtggtggtgacacaaatctaaatgtgtgataaaatggtaaaaacacgcacataatgaatgcatggaaaactagtgatatctgaaagaagttggtgcattgtgtaatgacaattttctgattttttgtttttattttttagagacagagtcttgctctgttgtccaggtcgaagtacagtggcacagtcatagttcattgtagcctcaaactcctgggcttaagtgaccctcctgcctcagcctcctgagtagctgggactacaggtacacgcccccatgctggctaatttgtgtatttttattttgtagagacagagtctcactatgtttcccaggctggtctcaaactcctaagctcatgcgatcttactgccttgtgctcccaaagtgatgggattacaggcatgagctacctactgtgctcaaccagttttctgattttgaccatatgctatggttatggaagatgtgaccattgtggagacgctaggtgaaaggtgaatgagacctctctgcactatttttgcaagcttctgtggatctataatcatttcaaaataaaaataaataaattttaaaaagagcctgctgcaagactgagaagtgcctatggtgtctgattccctgtcgttgggcatggattctgtttcctactctgggcccttttggacaaagccatgcagaatatcttatcccatacctgcccctgtgagccacttactctttctcaaagttttcagcaaccctgggagtaggcggtatgtggtggttcacacctataatcccagcactttgggaagccaaggcaggaagatcgcttgagcccaggaattggagactagcctaagcaacatagtaagaccccatttctaccaaaaaaaaaaaagttagccggtcttgatggcatgcgcctgtagtcccagctacccaggaggctgagataggaggatcacttgagcccagtgaggccgacgctgcaatgagcggtgataggccactgcactccatcctgggcaacagagtgagaccctgtctcaaaaacaaaaaaattaaaattaaaaaataattagctggatgtgggtggtacatgcctatggtccctgctatgcaagagggagaattgcttgagctgaggaagtcgaggctgcagtgagccatgatcatgccactgtattctagcctaggcaaagagtgagaccctgtctcaaaaataaaataaaaataagacttgaataaaaggacaggaagacacaacatgataaaatgtcaaaacttccttacatttcatggatttccattaaaattttaataaaaatgtttgaactttctagcattgttaggagaaaataaacaccaaaaattctgagagagaaaaactgtcaaggaagtagccctagtagatactaagctgttttaaaactgataactgtaaggtgatcctggcaattaaatgaacagttcagtggaaataaatataaagcccagctctacttagatatatgaaggacataaaatatgtgataaagatggcagttttgatgattgaaggaaatacagattctggagtactttgtgataccaaactagatggccaaataatttttaaaattgtatttttacatagaaaaaaaacagtcaaatgagaaactataaaaaattatttggggccgggcacaatggcttacgcctgtaatcacatataggaggagcacatgaggccaggagtttgagaccagcctgagcaacattgcaagaccccatctcaaaaaataataataatttaaaaaattagccaggcatggtgatgtgtgtcttttgtcctagctacttgggaggctgagacagaattgcttgagctcaggagtttgaggttgcagtgagctagaatagtaccactgtactccagcctggatggcagagtatgacactgtctctaaaagagaaaaattatttggaactcctaccacaaaaataaaggattaatttccttcctttaaagaagtctaacaattcagaaaataaaaatgatagaaaatgaaataaatgatgagaccacagataagaagctaaaagcgttctttaaacttatgaaaagaagcttcttgttcatggtaagaaaactagaaactagaaccacaatttacatgtgttagatagacaagcataaaaaaatttgtatcagtagtattcctcagtgtggaatgacaggtattctcatatattgctggcagtactatgaatggtacagccttaacggagagcagcttggaagtagttaataacagtaggctgactaggagagaaaaggtagtgcttgaggggagaggagcttgcccaaaatccatcctgctgccccaaaagcctgtatctctggccttggggataaaacagaatttgcctagctggttgtcccatctatatttatgtggcatgttcagagtggacaaggatcaatacaagggaaatggaggcaattttaatagaattataagagctgtgaggcacatgtggtctcatgtggctttttttgtctcggctttgcctccttaggaactgcctcttttctaaagaggactccaaaggaaggactggtcatctctttcatatctcaaaaccatggctcaggtaaggcgatggtttctctctcctttctgaaagtcttttttttttttttttttaaggatatttgggcatgtgtcggtcttgtcctacatcctcctacctatctttcccttcagaaaactggtcctcacttcttcccatattggtcagataagactctaccttccacaaatgctcccaattttaaccaatgttgacacattaagtggataaatcaggccaggcatggtggctcacaccttaacagcacttcgctcccagcactttgagaggctgaggcaggagaattgcgagtccaggagttcaagaccagccagcctgggcaacata[140 bp omitted]catggtgaaatgctgtctctactaaaaatataaaaattagctgggcttggtggcaggcgcctgtaatcccagccagttgggaggctgaggcaagataattgcttgaatccaggaggcagaggttgcagtgagtgaagattacgctgctgcactccagcatgggtgtcaaagtgagactctatctcaaaaaaagaaaaaaattagcccagtgcaggtgcagtggcatgcacctgtggtcccagttatttgggaggtttaggtgggaggatggcttaagcccagaggtcaggtctacaatgagccatgatgtcactgcacttcagcctgggtgacagaacaagactctctttattaaaaaaaaaaaaaatagtggatatatcattcaccatctcctctctcagtcttcttccagaagctatgcagggacaaaaatgcatttccttgaactaaatgaaaatgtattactgaatgaacctgtcttgtgtagattaaaaaaatatataaggctttattgcatccacagactggagtcaagatggtagtgaaattgacagaatttatatagaattagtaagtagcaagaagtcttgtgttgaggctttgaggatggaaacgtgattggcaacttgtacaaaaaactgagaatcttgtgtttcttctctaccttcagttttgctcacagctgctaacaatttctaaaaatctgtggccttccaataacaccttcttagtatattaattgtattctagatttatttctattttcacatttcttccaattttatgtttgcatgtagaagtaaatatatttgtatagactgccatactaaactagaagtgtaactcctaaaatattctgcttctggtttcaaagacactactctttcttgtttcagtcagaacatttatcttcgtatctggacctcttaaatactggtgttctccagattctgtattggttctcttctatttacactctcctgttcactacctaccactattattctaatgctgctcaagtaattttgattctaaacctctgtcttttttgatgtattgtcgaaactatatatccagcctccagctagatatcgccacctacatgttccgcagatccttcatgcacatgtctgagattcacctcattgtctccttctgcccatcctatccttttgtttttttccaatctggttagggccccaacccctacccacctgccaatacagccaacatgagttaaaagtctcccattcactgcaaaactattgagtggtaaattctgttcctcttaccacagttccctccatcctccactgataccatccttatttgggttcctttctcatagtggtcacttgtcttcccatttaacatcttcacttattttccacttctccaagggctcaccccaatgcttgcttacatatttttgttttctgtgcttttgtgtttaactttttattatggtaaaatatacataacagagagcttaccgttttaaccattttttagcgtataattcaaagccattaagtacgttcacaagttgtgtaactgtcaccactatctatttccggaactgtttttcttcatttcacatagaaattctgtaccaataacactaaacagttactcccaattttattctttatagcatcagatggaaagtgccttagaggaatgtatatagacatttcattaggagacaagaaaatgttaaaatgcttataacagtttaaatacgagaataataatcattaatgctaatagagttttccagttaatgaacatgatgcacatctccttttatttagatcttccttaaattctctcagtaatgttcctttcagtgtaccagtcttgtaaatgttttttatatccttggatattttttaatgctgctgtaaatggtgttcatttttatttaaatttcccactgtttattgctagtatgtgaaaatgcaattgatttttttatcttgacctgcaacctttcaaaactctcttattctagtaattttttttttgttagattcttaggattttctatatggacaatcctgtcatatgtgaataatgactgttttctttctttctaatctatattcccttcatttctgtctttccttactacattgtctagaaccttcagtacaatgttgagtagaagttctaagaacagactttcttgtcttgtgcccaacttaggcaaaaggcattgtttttcattattaagtttgatattagctataggattaggatttttttttctttttttttttttcttgagacagagtcttgtcctgtcatccaggctggagtgcagtggtggatctcagcttactgcaacctctgcctcccaggttcaagcgattctggtgcgtcagcctcccacgtagctgggattacaggcatgcaccaccatgctggcctaatttttgtatttttagtagagacagcatttcaccatattggcgaggctggtcttgaactctggcctcaagtgttctgcctgccttggcttccccaagtattggcattacaggtgtgagccaccatgtccggctggaatttcttttttttttttttttttattatactttaagttttagggtacatgtgcacaatgtgcaggttagttacatatgtatacatgtgccatgctggtgtgctgcacccattaactcgtcatttagcattaggtatatctcctaatgctatccctcccccctctccccacccgacaacagtccccagagtgtgatgttccccttcctgtgtccatgtgttctcattgttcagttcccatctataagtgagaacatgcggtgtttgattttttgtccttgtgatagtttacggagaatgatgatttccaatttcatccatgtccctacaaaggacatgaactcatcattttttatggctgcatagtatttcatggtgtatatgtgccacattttcttaatccagtctatcattgttggacatttgggttggttccaagtctttgctattgtgaatagtgccgcagtaaacatacgtgtgcatgtgtctttatagcagcatgatttatactcctttgggtatatacccagtaatgggatggctgggtcaaatggtatttctagttctagatccctgaggaatcgccacactgacttccacaatggttgaactagtttacagtcccaccaacagtgtaaaagtgttcctatttctccacatcctctccagcacctgttgtttcctgactttttaatgattgccattctaactggtgtgagatggtatctcattgtggttttgatttgcatttctctgatggccagtgatgatgagcattttttcatgtgtcttttggctgcataaatgtcttcttttgagaagtgtctgttcatatcgtttgcccactttttgatggggttgtttttttcttgtaaatttgtttgagttcattatagattctggatattagccctttgtcagatgagtaggttgcgaaaattttctcccattttgtaggttgcctgttctctctgatggtagtttcttttgctatgcagaagctctttagtttaattagatcccatttgtcaatcttagcttttgttgccattgcttttggtgttttagtcatggagtccttgcccatgcctatgtcctgaatggtattgcctaggttttcttctagggtttttatggttttaggtctaacgtttaagtctttaatccatcttgaattaatttttgtataaggtgtaaggaagggatccagtttcagctttctacatatggctagccagttttcccagcaccatttattaaatagggaatcctttccccattgcttgtttttctcagatttgtcaaagctcagatagttgtagataagtggcattatttctgagggctctgttctgttccattgatctatatctctgttttggtaccagtaccatgctgttttagttactgtaaccttgtagtatagtttgaagtcaggtagcgtgatgcctccagctttgttctttcggcttaggattgacttggcgatgtgggctcttttttggttccatatgaactttaaagtagttttttccaattctgtgaagaaagtcagtggtagcttgatggggatggcattgaatctataaattaccttggtcagtatggccattttcacgatattgattcttcctacccatgagcatggaatgttcttccatttgtttgtattctcttttatttcattgagcagtggtttgtagttctccttgaagaggtccttcacatcccttgtaagttggattcctaagtattttattctctttgaagcagttgtgaatgggcgttcactcatgatttggctctctgtttgtctgttattggtgtataagaatgcttgtgatttttgtacattgattttgtatcctgagactttcctgaagttgcttatcagcttaaggagattttgggctgagacaatggggttttctagatatacaatcatgtcgtctgcaaacagggacaatttgacttcctcttttcctaattgaataccctttatttccttctcctgcctaattgccctggccagaacttccaacactatgttgaataggagtggtgagagagggcatccctgtcttgtgccagttttcaaagggaatgcttccagtttttgcccattcagtatgatattggctgtgggtttgtcatagatagctcttattattttgagatacgtcccatcaatacctaatttattgagagtttttagcatgaagggttgttgaattttgtcaaaggccttttctgcatctattgagataatcatgtggtttttgtctttggttctgtttatatgctggattacatttattggtttgtgtatattgaaccagccttgcatcccagggatgaagcccacttgatcatggtggataagctttttgatgtgctgctggattcggtttgccagtattttattgaggatttttgcatcaatgttcatcaaggatattggtctaaaattctcttttttggttttgtctctgcccggctttggtatcaggatgatgctggcctcataaaatgagttagggaggattccctctttttctattgattggaatagtttcagaaggaatggtaccagttcctccttgtacctctggtagaattcggctgtgaatccatctggtcctggactctttttggttggtaagctattgattattgccacaatttcagatcctgttattggtctattcagagattcaacttcttcctggttagtcttgggagagtgtatgtgtcgaggaatttatccatttcttctagattttctagtttatttgcgtagaggtgtttgtagtatcctctgatggtagtttgtatttctgtgggatcggtggtgatatcccatttatcatcttttattgcgtctatttgattcttttctctttttttctttattagtcttgctagcggtctatcaattttgttgatcctttcaaaaaaccagctcctggattcattaattttttgaagggttttttttgtctctatttccttcagttctgctctgattttagttatttcttgccttctgctagcttttgaatgtgtttgctcttgcttctctagttcttttaattgtgatgttagggtgtcaattttggatctttcctgctttctcttgtgggcatttagtgctataaatttccctctacacactgctttgaatgtgtcccagagattctggtatgttgtgcttttgttctcgttggtttcaaagaacatcttgatttctgccttcatttcattatgtacccagtagtcattcaggagcaggttgttcagtttccatttagttgagcggttttgagtgagtttcttaatcttgagttctagtttgattgcactgtggtctgagagacagtttgttataatttctgttcttttacatttgctgaggagagctttacttccaagtatgtggtcaattttggaataggtgtggtgtggtgctgaaaaaaatgtatattctgttgatttggggtggagagttctgtagatgtctattaggtccgcttggtgcagagctgagttcaattcctgggtatccttgttaactttctgtctcgttgatctgtctaatgttgacagtggggtgttaaagtctctcccattattattgtgtgggagtctaagtctctttctaggtctctaaggacttgctttatgcatctgggtgctcctgtattgggtgcatatatatttaggatagttagctcttcttgttgaattgatccctttaccattatgtaatggccttctttgtctcttttgatcttcgttggtttaaagtctgttttatcagagactaggattgcaacccctgcctttttttgttttccatttgcttggtagatcttcctccatccttttattttgagcctatgtgtgtctctgcacgtgagatgggtttcctgaatacagcacactgatgggtcttgactctatccaatttgccagtctgtgtcttttaattggagcatttagcctatttacatttaaggttaatattgttatgtgtgaatttgatcctgtcattatgatgatagctggttattttgcttgttagttgatgcagtttcttcctagtctcgatggtctttacattttggcatgattttgcagcggctggtactggttgttcctttccacgtttagtgcttccttcaggagctcttttagggcaggcctggtggtgacaaaaatctctcagcatttgcttgtctgtaaagtattgtatttctccttcacttatgaagcttagtttggctggatatgaaattctgggttgaaaattcttttctttaagaatgttgaatattggcccccactgtcttctggcttgtagagtttctggcgagagatccgctgttagtctgatgggcttccctttgtgggtaacccgacctttctctctggctgcccttaacattttttccttcatttcaacttcggtgaatctgacaattatgtgtcttggagttgctcttctcgaggagtatctttgtggcattctctgtatttcctgaatctgaatgttggcctgccttgctagattggggaagttctcctggataatatcctgcagagtgttttccaacttggttccattctccctgtcactttcaggtacaccaatcagacgtagatttggtcttttcaaatagtcccatatttcttggaggctttgttcgtttctttttattcttttttctctaaacttcccttcttgcttcatttcattcatttgatcttccatcattgataccctttcttccagttgatcgcatcggctcctgaggcttctgcattcttcatgtagttctcgagccttggctttcagctccatcagctcctttaagcacttctctgtgttggttattctagttatacattcatctaaatttttttcaaagttttcaacttctttgcctttggtttgaatttcttcctgtagctcagagtagtttgatcatctgaagccttcttctctcaactcgtcaaagtcattctccgtccagctttgttctgttgctggtgaggaactgtgttcctttggaggaggagaggtgctctgctttttagagtttccagtttttctgctctgttttttccccatctttgtggttttatctacttttggtctttgatgatggtgatgtacagatgggtttttggtgtggatgtcctttctgtttgttagttttccttctaacagacaggaccctcagctgcaggtctgttggagtttgctagaggtccactccagaccttgtttgcctgggtatcagcagcagtgtctgcagaactgcggattttcgtgatccgcaaatgctgctgtctgatcggtcctctggaagttttgtctcagaggagtacccggccgtgtgaggtgtcagtctgcccctactggggggggtgcctcccagttaggctgctcgggggtcaggggtcagggacccacttgaggaggcagtctgcccgttctcagatctccagctgcatgctgggagaaccactgctctcttcaaagctgtcagacagggacatttaagtctgcagaggttactgctgtctttttgtttgtctgtgccctgcccccagaggtggagcctacagaggcaggcaggtctccttgagctgtggtgggctccacccagttcgagcttcccggctgctttgtttacctaagtgagcctggacaatggagggcacgtctaccccagcctcactgccgccttgcagtttgatctcagactgctgtgctagcaatcagcgagactccgtgggcataggaccctccgagccaggtgcggaatataatctcctggtgccccgtttcctaagcccgtcagaaaagcgcagtatttgggtaggagtgacccgattttccaggtgccatctgtcacccctttccttgaccaggaaagggaacatcgtgaccccttgcgcttcccgagtgaggcaatgcctcgccctgcttcgtctcgcgcatggtgcgctgcacccactgtcctgcgcccactgtctggcactccctagtgagatgaacccggtacctcagatggaaatgcagaaatcacctgtcttctgcatcgctcacgctgggagctgtagaccagagctgttcctatttggcctggaatttcttttttaaatgattgaagacattccagtttgctgatagtttttatcatgaatgagtgttaaattttctcaaaagtttttctgggccaggtgtggtggctcatgcctgtaatctcagcactttgggaggccagggcaggcgaatcacttgagccaggagttcaagactggcctgggcaacatacaaaaatacaaaaaaaattatctggatgtggtgggcgcctgtaatcctagttgctcaggaggctgagacaggagaatcgcttgaacccaggaggtggaggttgcagtgagccaaggtggtgccactgcactccagcctgggcaacaaagagtaaaactccatctcaaaacaaaacaaaaaacaaaaaaagtgtttcttcatctattggtttttcacattatatggcttttttctttttttaatattactataatgaattatgttgattgatttttgaaaaatttagttgtcctgggataaactccacttggtcatgatataatacttttgtatatattgttttatatattaaatatgatgaatttgctaatatgttgttactgatttttcttgtctgtggttcataatggatctaatgtatagtttttctgtttgatgtcagggtaatgctatctcataaatgaattgggttgtattctctcctcttattattttctgaaagaatttatatagaattggtattatttcttaaacgtttgttagaattcactgtgaagccatctatctgacttggagatttctttgtggaaagttgtttaaccagtagttcaattttggtaatagaatgaagactgttcaggttatcagtttttcttttaattcaatgagcttttgtagtttgtgactgtctaggaatttgttcagttcatctaagttgtaaaatgtattggcataaagttgttgccctttttatccttttgatgtttgtataatctgtaacaataccccttttttattcttgttattgatgatttgtatgtctcactttttcccctggttctttggctacaggtatatcaatgtagttgatcttttcaaagtaccacagcagcttttagtttcatggatttcttctagtatttttgttacctcatttctcctcttttattttgtatttcctttccctctcatgactttgggtataattagctcttcttttccaattcttacatagatggaagtgtacattgagttaagacatttctttttttctaatagaagctttaaatgctataaatttctctgtaagcactatttaaagggctcccaagttttgacatgttgcattttcttattcagttgaaaatattttctaattttctcatgtttgttttttgctcattggttatttagaaatgtgtttaatttccaaatatttggggattttccaaatagcttcctgtaactggttctagtttaattctgtttcagtcagagcagagtctatatgatgtcttcctaaatttatggagacttcttttatagcacagagtacagtttaatttggtcagtgttctctgtgcccttgtaaagaatgcatattctgatgttattgggtgtaccctgtaaatatcagtgagattaaattggttgattgtgttgaaagttttctgtattcttattgttcttcagtctgttaaagcaatgactgaaggaagaaagttgaaatcttctattataactaagctttgtttttagatgcatttatatttaggattgttgtatcctctcatgaattcaccctgtcctattattatgaaatgcttcaattaatccttgataatattctaaataatattgtcctgaaatctattttggttaatatttttatagccattctaactttcttatgattgtatggtatctttgttctttgtgctgctataacagaatgcctgaaactggataatttatgaagaacaaaaataaattttctcacaattctggaggctgggaggtccaagataaagattcaggcaggtttgggtttctggtggggtctgttctctgcttccaagatggcaccttgaggctctgtcctcacatggcaaaagtacaagccagccacatgctacgtgaagccccttttacaagggccttaatcccattcacaaagggagaaatcttaatgactggcctaatcacgtattaaaggccctacttcgtaatactatcacattggcaacacctgaacgttgtttggtttttgtttcgagatagggcctcgctttgtagcccaggctggatttcagtggcacaatcatggctcacttcagcctcaacatcctgggctcatgggatcctctcacgtcagcctcctgagtagctgatactacaggcatgtgacaccatgcccagctaatttttctgttttttatagagacacaatttcaccatgttgcctaggctggtcttgagcttttgggttcaaccaatctgcctgccttggcctcccaaagtgctaggattacaggtgtgagccactgtgcctggcctacacctgaattttagaggggacacattcaaactatagtatatgatatacctgatttccatcctttttactgttggtttttttttttgttttttttttgagacaggatcttgttctgtcacccagactggagggcagtggtgcaatcaacctcccaggatccagcaatcctcccaccgtagccacctgagtagctaggactgcaggcatgtgccacctcatctggctaatttttaaattttttatagaggtggggtctcactatgttgcctaggctggtcttgaactcctgggtccaagtgatcttcctgcctggcctcccaaagtgctgggattataggtgtgagccactgcaccttgcccatcctttatacttttatttacctatgttttaacgtttatagttaatctggtacagctagtagatggtttggtttttcttttttcctccaatctgatactcttatcttttaattggagtttttagtccattcaatgtaattatcaatatagttgaatttaaatatgccatcttcctattttttccaattatgttttctttttttttagattgagaaattttttatgatttcatttgtttctgtattatttattcacttattagaagtacttctttattttcttgtttgttttgttttttagtggttgctctaggccagaggttggcaaaccattgcatttgagctaagtcaggcatgatgcctggttttgtagagttttattggaactcagccaacggtgaaagcattttgcttagtttatattgctttctttctcttcaagttcactgatcttttctttcttcaatgtgtaatctgttgttactaccacccgttgtatttttcatatcatgtatttttcttctctagaacttttctttgatcctttttatatcttccatttctctcatgtttatctttttttctacattcttgagcttatggagtatgtttataatcctgttttgttgttgttgttgttgaaacggagttttactcttgtcgctcaggctagagtgcaatggtgtgatctcagctcactgcaacctctgccttccgggtttaagtgattctcctgcctcagcctcctgagtagctgggattacaggcacctgccaccatgcccggctaatttttgtatgtttagtggagattggggtttcaccattt[135 bp omitted]ttgtttgagactctgttgcccaggctggagtgcagtggtacaatcagagctcactgcagcctctaactcctgggctcaagcgatccccccacctcagtctccagtgtagctgggaccacaggtgtgtgccaccacacctagctaatttttaaattttttgtagagacagggttttgctatgttgcccaggctggtctcctgggctcaagtgatcttcctgtctcagcttcccagagttctggaattactggcatgagccactgtgcccagcccatcttgtttgttaaatccatcacctctgtcatttctgggtctgtttcttttgatcattttttttccctcatgaatattagtcctattttgcatgcttggaaattttttacttgaattttaaattgctgaatgctggattttgttatgttacgttaaagaattaagttacttcagtccattttgatccttttgaggcttgcttttaagtttttgttagtgtaggtcaagagcagcattttggtctacggctaatttagtccgattcctggagctacattaacacattattttcacccaaaattcatagtttacattagggttcactattgatattgataatgtgggttttgacaaatatataatggcacatattcaccattatattatcttacaaaatggtttcactgccctaaaaatcctctttgctctgcctatttatccctccctccctgctaccccctggaaaccactgatctttttactctctccaaaatgttgccttttgcagaatgccatttggttagaatctggaagactatataccatgtagccttttcagagtggcttcattcacttcgtaatatgcatttgaattcctcctaacccgttcttgcttatctgttcctacattctgttgtattttgtgtcagtcacatacgttttaatgattcatttcattcctctgttagctttttagttatgcgtttgcattttttgtgtgattgccctaggattacagtatggatcttcaacttaccaggattttcttaaggttaatattaaattagttatggtaaaaatatatcaatcttgccacattatagtttcatttattaatacctgtcttttacttttttgtttgccatgtatatgatatttatgtttgcaataagtggtattagaagggtctgtagtccacaggccaaaatccagcctgtttcctattttgtacagattgtgagctaagaattgtctttgcatttgaaacgtttgaaaacatttacaagaaaaaatattcctgacacactaaaacttcatgaaatttaaatgttagtgtccataactaagttttattgaaacacatctttgctcatttatttacatattatctatggttgctttcatgctaaaatagcagaagacattccctgactgctgcttgaaacagtcatatctcataaagaagaaaggaaatgaatatttatactcttacaatttttcttattttcttcataccttcctaaagaccttagtgttatttttaccttaagcctgaagaatttcctttaggccccaccaccccttccccttcccccactccagagatagagatctcactttgttgcccaggctgatctcaaactcctggcttcaagcagtcttcctgcctcagccccacaaagtgcccggattacagaagtaagccaccacgcccagcctattagcatttttgatggtgcagtcctgctggtgatgttgcccaggctgatctcaaactcctagcttcaagcagtcttcctgcctcagccctccaaagtgcccagattacaaaagtaagccaccacacccagcctattagtatttttgatggtgcattcctgctggtgatgaattctctaggttttatctgaaaatatctttatgttgccttcattttgaatatatagttttgctgcgtgtagaattcttggctgtgtagcagtttaattaggatttggctaagtgtggttttctttggtgtttatccttttagggttaattaaactccttgaatatgtaaattaaaagttcttgccaagtttggagttaggccattatttccataaaatttatttatgccctttctttttctctccccattctgggactctaattatatccatgttggatttttgaatatgacctatggatctttgtgagtctgttcatttttcatgattcttttttctttctgttcagattacttactttctcttgattgatttacacagatactgattctctatttctgtgctcctatcgagcttctctagttaattttttatttcagttatttctttgaatacatttagaacagctactttgaagccttttttttttttttttttttttggcaaaatctgacatcagggcccactaggagttagtttctgtgattgtctttttgtgactacaggttttattccccccactcctttttgttttgttttgtttgcatgtttagtaatttttgctagaaaactggacatcataaatagtattgtaatctgaattctgttatatctgttatgttcttctgagaattattattatttttagtaggcaattagcttgcttgtaatcaaacatcaaactttgtcttcctgctcagtgtaaagcagctgatatatcctcttagttcttcaagcttctagctgctgccttttaccctaacctcctgaaagcagataggttctctcttgtgttcatctgcttttctctcaatcaaggaattggtgagtgtttagatttgggggctcacgtcctgcatttctctttttcaagttttaccctctacacttcctgctgctttgtcagttcaagctctgacaccttaatcccgtaagccttaaattttattcttcttgggctatgagcaggttgtggaataccatcagtcaagaagcagaagccttagaatcttattaggtgcacttttatttttcaagattcttttctgttgtatttctgcctgctttttgctaagccctcggtgatctctccaacacatgcatattttatcaaccaggagtttggcagagtttatgctcagattttcattttcatccgttctgtagttccctcacttccagaattaacctaaatttccagctctcactttttgtgtgtgtgtgtgtgtgtgacacagtctctctctgtcacccagactggagtgcagtggcacaatctcggctcactacaacctccatctcccgggttcaagcgattgtactgcctcagcctcccaagtagcaggattacaggcacccaccaccacacccagctaatttttgtatttttagtagagacagggtcttgccatgttagctgggctggttttgaactcctgacctcagatgagccaccacgcccagcctcaagctctcgtttctgtcctcccgtcacctttgaggaagtaagtggtggttttatgccatgagagctgtggggtttcaggtaccatgatgcaaaaacagccacaaaattagcagttcttgtacattgcagttgctatccttcaaggataagctcttttccagtttccgcctgctttggttgctttccagtgctattagttgtttattgtatggcatgtgcacattttataattattatctgagggaaagtgtccctgactgttttactctgttaatgctgcatgctgaaaaatctcaccatgcacatacaatattcctccttagtgaagcctgagaaattgttctacctttgtgatacatgctgtatcttgtacatacttctttgttgtacctgtgacaccttcttgcaggtttgtgtttacttacattttcttgcaagtatgtgttacatgcctctggtaacttctgagcagaaacagtgtttgtcttggcacttccataaataaatacagtttttggcattaagtggcttcacagtaaatattcttagaatgtgttatttaaaaactaactgatggatatttttaccttgatttttgttttccctacaatataaatcataaaacagggaaaattgtagtctttctatattaggattcgtatgactgccacaaggaagcagggtcaaaagtagttcccaatatccagtccacctgttctttttcttttccttttttttgacagagtcctgctctgtcgcccaggctggagtgcagtggcatgatctgggctcactgcatcctccgcctcctggtttcaagctattctcctgcctcagcctcccatgtaactgggattacaggcgcacaccactatgcccagctaattttttgtatttttagtagacatggggtttcac[131 bp omitted]cattctagggatcagtgtctttcaatgatgtgactgtggacttcactcaggaggagtggcagcacctggatcatgctcagaagactctatatatggatgtgatgttggaaaactattgccacctcatctctgtgggtaagaaaaatcctctttgaaactttagtagcatgcacttcctctcaaagtgcctaattgtgtataatcttgaatttcaggaataagaggtgatgaattccttttcgttagcagaatgaatgattgtgtcttcacttacccagtgcaaggtgctacctatattgttacacaaatgggtgtcttaatttgcagtactgaacatgcccctttcctcatttttcagtggtattatagcccaatcaacttaagtctttttttcacttttcagggtgtcacatgaccaaacctgatgtgatcctcaagttggaacgaggagaagagccatggacatcatttgcaggtcatacctgcttgggtgagtttctggctcttaggcagacacagtctagcagaatgtaaatttaaaagggtcaagtgggggtgatacctttgaaatgtttcaggagtatctttttttaaaggctcttgacctctgaaaaccttcatgcctataaaactcaaaaccagacctttaggctaggtatggtggctcatgcctataatctgacactttgggaggccaaggtgagaggatcacttgaggccacgagttcagagccagcctggacagcatagcaagaccccatcactacaaaaagataaaaataaaaaattagccaaggttgggtgtggtggctcacacctttcatcccagcactttgggaggccaagatgggcagatcccttgagcccaggagtttgcaaccagcctgagaatcatggcaaaaccccatctttacaaaaaaaatacaaaagttagctgggcatggtggtgtgcacctttagtcccagctactcaggaagctaaggtgggaggatcacttgagcccaggaagtcaagtctgtggtcagctgtgattgcaccactccaacctgggagacagagcaagagcctgtctcaaaaaaaaaaaagccaggaatgatggcatacacctgtggttccagctactcagaaggttgaggtaggagaatcacttgagcccaaggattcaaggttacagtgagctaggattataccactacacaccagcctgggctacagagccaagaccctgtctcaaaaacaaaaacagaaccagacttttaaatatcactctctccggctgggcacggtggctcacacctgtaatcctagcacttcgggaggctgaggcgggcagatcacctgaggtcaggagtttgaaaccaacctggccaacataatgaaaccctgtctctactaaaaatacaaaaattagctgggtgtggtggcacatgcctgtaatcccagcgactcaggaggctgaggccggagaatcgcttaaacccggtaggcggaggttccggtgagccaagatcgtgccattgcactccagcctgggcaacagagcaagactccatttcaaaaaaaataataatacactatatatatcactctccccaaatacattctttcctagtttgcttcatattatcaaaaacaactgccactctgaatgtaccataagccatctttcttttagatcttttttattagctcgtgtatctttttccagccttctcagtccttatcttgccattgtgataagttttgtcaggaaaggtttatttatttatttacttattggttgttttttgtttttgtttttgagatggagtcttactctgtagcccaggctggaatgcagtgacgtcatcttggctcactgcaacctccgcctcccaggttcaaatgattctcctgcctcagcctcctaagtagctgggattacaggtgcgcatcaacaggcctggctaacttttttgtatttttagtagagatggggtttcaccatgttggccaggctggtctcaaactcctgaccttgtgatctgcccacctcggcctcacaaagtgctgggattacaggcttgagccactgcacctggcaccattgtaatagatttctttcaggctttcttcatcctgtctttaaaaagagaaaattattggttagtggtcctctccttacttacttaacatttcctttccttcataccacctcggctttgttttctgtgctaagctccccttctcactacaaatttagctattaattttagaactcacttaacacaacccaggttgataaagtcaaagttgccattttcttccataaaacctttgtggttcattttacatggcttttcatcattcctgcaatcaatcctttgtttaagtgaaataacactaattcttatcctaattccttgaatgcttatttacaacttggcctgttttctttaccactgtggccatatcacctgaaaaatgcttggcatataatagtcataacagattttatttttttaaataaatgtttattgtttcacttaacactcggtcttatttctctcatatgccctcacatgatctacctttcaattataatgattccatgcattctcagactgatgctgtttattttatgtagatggcactgacgtcaacatacaaagcacatttctcctaccttcactccagttcatcaggcgtactacagtctatcatctcacctattttctgacaatgtgtcagaaatgaaaatcactgactttctcagctcttaaatttttccccactatttatttatttatttattatttttgagatggagtcctgctgtgccacccaggctggagtgcagtggttcagtctcggctcactgcaaactccacctcctgggttcaagtgattctcctgcctcagcctctggggtagctgggattacaggtgcccaccaccatgcccggctaatttttgtatttttagtagagatggggtttcaccatgttggccaggctggtctcgaactcctgacctcaggtgatccacctgcctcagcctcccaaagtgctcagattacaggcatgagccaccgtgcctggcctcccattatttaactcaaaataataataataataataataataataataattattattattattattattattattattattatttgagatggagtttcgttcttgttgcccaggctggagtgcaatggctcgatctcgactcaccgcaacctccggctcccaggttcaagcaattcttctgcctcagcctcctggttagctgggattacaggcatgagccaccacacccggctaattttgtatttttagtagagatggggcttctccatgttggtcaggctggtcttgaactcctgacctcaggcaatctgcccgtgtcagcctcccaaagtgctgggattacaggcctgagccaccgtgcccaatcccttcaaatttattttgtttctactacaaagtcaacttgatttttctgtctctcttatcatttcttatggatctcttcacaatttgtaatatgtttatcagcttgtgaaatatattgacatcctcccatattctgatttctcactgatgtcatacaaaatgacaactatcttatttcatgtatttattactggaattaccatttgtctttgtggtaaattttgtctggattcattcaatgtatattgttactttcctcacaaaatataccatcagtttttccctttttttttatcatttattctatgaaatggaaatttctcttctttcaggaactgtcacaataagccctcatctggtcttttcaactttctcttggagaaaattcttgataatttccacttgatctagtctcctaattgttgttcatgaatgtagggtttgtcatcacatagatacttttcattgtgttgtgttctccctttatactatatcttttaagtctcaagatttctctgtgaaatcttccttgattactgcacatcatatctaccttcctttttttctgaattcctgtcctaactactgactataacacaaacatgcacaactcttgaatagtcatataatttcattcctaattgtttttgcttaaggatttttaaggatgcttaaggattctttccctcaaaaataagatcccttttgaatcttcatttctttgaaggaatcaagcattcttaaggattcttttcctcaaagataagatcccttttgaaccttcattactgtggtattatttaacatgttaggtattcagtagttactgtgttaattgcttatggagctatgtaagggagatatcttttcatccattcagaaagcatatactagcaagttccttttagatgtacctactcatgctgtgtccctacagattgtgcttgaagtggttgcattctgccagacaccacctaactatgagtatgcagtgatcatgtaaaatttttttttttaagatggagtcttgttctgtcgtccaggctggagtgcagtggcacgatctcagctcactgtaaactctgccttccgggttcaagtaatgctcctgactcagcctctggagtagctgggagtacaggtgcatgccaccatgcccggccagctttttttgtatttttagtagggacagtttcaccatgttggccaggctggtctggaactcctgacctcaggtgatctgcccgcttcggcttgccaaagtgctgggattacaggcatgagcaaccgtgcccagcccaaaagagtttaaagatcaccaataaagtatttatttctatgaagaaggatcactatcgagtctgcatttttcatgaaatatttatgtcaaagtgtaaggttgttaaaagatttgttaacagagttttcctaggcaataattatattgcaaattttaaagaagtagagcttaaaatggtaggggaaacatatgaagggtttatgagatcatggaatggtatgatttctttgaagattctctaaagataaatagaaataaacctggaaggcaagctaattaattaaaagaatgtgtgcacaagtgtgttattaggaataagtaaggtatatatagggcagtaagtatcaggcctgactgaggcaaaaactacctgttataaacaggtgagatctgtcaggtatgtggacaaccctgaaaacttgtgagaatataaaaaatgaatctagacaatatagttttgtttacaggagaaattccttgtatatgttagaattgaagttcttggactcaatgaagaaatagatttttgagcatagctttaacattgcttcatcagatatagatgattgcaaggtaagtaaagttagaaatagctatacttttataagagaaatgaaggttaaagttactctgatttaggaccagattgttcaatctaccatttgaaattggtattctgatctaccatatgaaaaactggaataaaggaatgttactgcattggggaaggatgtaagccagtcttaaacctggaaaagtgagtcagtaactgaaaagaggactaggcatgagagctttgttattgaacaattctgaaagaagtgatttagcagcagtctgaatatagcaattgaatatattctgatcttttttaaagttgctatcggaagtattttcctaattttccattcataagagaaaataatacataattatgtagaggattagagcatagactgtagaaaatgaattgataatttaaaagctaaattaatcaatgttgactacatagaaagaggaggtgggttgaacagctggaagtgttttaccacagtcatctagggatgtgtgtataaaagtattggtgatcagccgggcacagtggctcatacctgtaatcccagcattttgggaggccaaggtgggcagatcatgaggtcaggagttcgagaccaacctggccagcatggtgaaaccccgtctctactaaaaatacaaaaaattagctaggcgtggtggcacatgcctgtaatcccagctattcaggaggctgaggcaggagaatcgcttgaacccaggaggcagaggttgcagtgagccgagatcacgccactgcactccagcctgggtgacaaagcgagactttgtctcaaaaaaaaataataataattattataggtgatctgtgtcctccagaagtaatctttcctctagtattttcgctaaacaaagatttctgctaatttttcttgtccatcctacttacattttaatgcttttgataggttcacttcattttttctgaacacttatctaaccatcaacccccttctaccattctttgacttcttggttggtttcactttctctaagaagttttagtgcaaaatgcaaaaggtattaatgtttattgtttacatcttcatccttttccactctgaagcagtttttgtttaggttcccctccccgcacccctgccaggccagtggtcatttgttctgagtctctttttgcgccatgtgctagaccctagtaaaatttctttgcataggaaatgtgtgaagattcacaaattgttatcaattatattcttttctagaagaaaactggaaagctgaagactttttagtgaaattcaaggaacaccaagagaagtattctagatcagttgtaagcatcaaccacaaaaaactggtgaaggagaagagtaaaatatatgaaaagacatttactctaggcaaaaaccctgtgaattcaaaaaatctacctcctgaatatgatactcatggaaggattttgaaaaatgtttcagaattaatcatcagtaatctaaatcctgcaagaaagagacttagtgagtataatggatatgggaaatcactcctgagtactaaacaagagactactcatcctgaagtcaaatcccataatcaaagtgccagagctttcagtcataatgaagttcttatgcagtatcagaaaacggaaactccagcacagtcatttggatataatgactgtgagaaatcattccttcaaaggggaggcctgattacacatagtagaccttacaaaggagaaaacccatctgtatataataaaaaaagaagagcaaccaatattgaaaaaaaacatacatgcaatgaatgtgggaaatctttctgcaggaaatcagtattgattctgcatcagggaattcactcagaagaaaaaccctatcaatgtcatcaatgtggaaatgcatttagaaggaaatcatatctcattgatcatcagagaactcacacaggagagaaaccctttgtttgcaatgaatgtggtaagtccttccgcctcaagacagccctcactgatcatcagagaacacacacaggggagaaatcgtatgaatgtctgcaatgtaggaatgccttcagattgaagtcacacctcattcgtcatcagagaactcacacgggagagaaaccatatgagtgtaatgactgtgggaagtccttccgccagaagacaacactctctctacatcagagaatccatacaggtgagaaaccctacatttgtaaagaatgtgggaagtcctttcaccagaaggcaaatcttactgtacatcagagaactcatacaggggaaaagccctatatttgtaatgaatgtgggaaatccttctcccagaagacaacccttgctcttcatgagaaaactcataatgaggagaaaccctatatttgtagtgaatgtggaaagtccttccgccagaagacaacccttgtagcacatcagagaacacatacaggggagaaatcttatgaatgtcctcactgtgggaaggcctttagaatgaagtcatacctcattgatcatcaccgaactcacacaggagagaaaccatatgaatgtaatgaatgtggtaaatcattcagtcaaaagacaaatctcaatctacatcagagaattcatacaggggagaaaccctatgtttgtaatgaatgtgggaagtcctttcgccagaaagcaaccctcactgtacatcagaaaatacataccggccagaaatcctatgaatgtcctcagtgtgggaaagcctttagcaggaagtcatatctcattcatcatcaaagaactcatacgggagagaaaccatataaatgtagtgaatgtggaaagtgcttccgccagaagacaaatcttattgtacatcagagaactcacacaggtgagaaaccctatgtttgtaatgagtgtggtaagtctttcagttataagagaaacctcattgtccatcaaagaactcacaagggagaaaacattgaaatgcaataaatgatgtggtttcttatatgaattctttacaagctgttgtaaacatttagttttaaaaagaaaagcatgctgaaacatgttaatgtaattttaaatcacaagtctaataattattaaagtaccatacggaataactgtctactgtttactagcatataaaataagtatgatcattattattgaactctatcagctatgaagctaaattttaaagtcaactgctcttcctactgactcaaatagtttattttttaaaaatacttatataatacatgcagagacaagatacacaatgattataagtattaatctccataagagaaaatatttatgaactatatttctcattgcactctgtaataaaaagcagttagttgttacttacctaagagttaccacttccgtagcctataacatcaaaacgtagtttttgcatgttttcaattttataaatatatattttatcagacatcatgaattattttgtgtcttgcttatttcactcaattttttaagatctgtacattattgcatgtggcagtagtgtattttcattttgcatactattccattttaagaatatattgctgtttatcctattgatggatatttgtattttttatacttttgtgtaataataaaaatactgctgtaaatattcttgtttatatcatgtgtgtgtttgcgtgtatgtatttctgttgaatttatacctgggactggacttattcattccaagagtatatatgaggtttttttggtcattcagactggagaatttctactaaaaagaaaccttgcggctttataattgtgagaaggctattaataaatcatggacatgtgaatgcagtatatgtagaaggcctttagctgtctctcaatgcttaaatgcaaaacaagcaaattcgtattggagggaaatcttgtagttgtcatgattttaggggtactttagccatagcttattacaccttatttaatatcaaggaattagaattcatacaagagaaagggacattgagaagggaaataggtgaggaaaatttgagagtaccagagtctttttttttttcttttttttttttttttttgagacagagtctcgctctgttgcccaggctggaatgcagtggagcgatctcggctcactgcaacctctgcctcctgggttcaagtgcttctcctgcctcagccttctgagtagctgggattacaggcatgtgccatcacgcccagctaatttttgtatttttagtagagacggggtttcaccacgttggtcagactggtctcgaactcctgacttcatgatccgcctgcctcggcctcccaaagtgctgggattacagggtgacccaccacgcctggctacaacataagccttttctaccataatctataagaaatgtaagtctctgaaaatcccaaataagtgactagagagattttgatgtttgagaattggaaatctgcgaagacagtgacttccacggtatccttttggcgaggagagtaagctcagtggcaacttgaacagcattattgcaggtccttcttgggaaggattacttataaccagtatttactatgtatatgaagtcattgtaataaaattcagtagaaattgaaatttattaattaatttattttttgaaatggagtctctatcgtccaggctggagtgcaatgacatggtctcaactcactgtaacctctgcctcctgggttcaaacgattctcctacctcagcctcccaagtagctggtactacaggcacgtgccaccacacgcagctaatttttgtatttttagtagagacagggtttc[142 bp omitted]ctgcataaacagaaagatggttcagggttcaaatatttgacattaaatatattaaacagaccctctggcctgttagagagggacagccattgccaatcagtagtaaatggaaccattcttgtcaatccttatttttctgataatttcatagcaaaaaatgaacagggcaatgagacaaaagcataaaaatttagacttgatagtagcacacagaaaacacacgtgtgtgtatgtgtgtatatatgtaaaatgccttgtctataatgactagacatgtcattaaatttagccttaataatttatatatgcataaagattttttaaagtatacatttttaaagaatataaagaattattaataggtttaataaacctattaaagtaactaaaacaggtaattataggacttataatcagaactgtgagaacccaaggattttgtcattgtgaatttataggggagttatatactagtatatgctaacagtggtgactaacagaagaattgtactcatgaccaaagatggaagcctaccttgtttttctaggtggagaggatggcctaactggatgtttatcctagcgtcaacccaccaaagatttggggaacatgtgagtcacattctctgggacattctactcccctttgattttgcatttccagacatttcagtggctaccacaaaaaataaaaagtatctgtggcatcactgcatgtgctgccctgtctcctgatttactgattatcatgaaatagccatgtactgtttcagtagaacattgtatccaatgtccactttattttcaaacatactacatatattcatgttttatagctcttgaatatgaagaactagaaagtatgagatattaacgggcagttttataaatggccaaactttgaaacttttgaggctgggcgtggtgtctcacacctgtaatcccagcactttgggaggccaaggtgggcagatcacctaaggccaggagtttgagaccagcctggccaagagtgaaaccccctctctactaaaaatacaaaaattagccaggtgtggtggcgcattcctgtaatcccagctactcgggggcctaaggcaggagaatcacttgaacccagtaggtggaggttgcagtgagccaagatgatgccattgcacgcctgcctggccaagagagtgagactgtgtctcaaaaagaaaatataatcatgaatataatcattattatttgtataataattattgggcatctttccataatcatgctcataactttcagttttaacatgttctttgtatgaaaaactgatgagtttcttatgaaactgtctatggctgtatcatatggcaattctgtatttctttttttttttttttttttttgagacagtttcactcttattgcccaggctggagtgcaatggtgcgatctcggctcaccacaacctctgcctcctgggttcaagcgattctcccagctcagtctcccgagtagctgggattacaggcatgttcccccatgcctggctaattttgtatttttagtagagatagggtttctccatg[139 bp omitted]ggcttcactattttacattaccaatggcaatgcaaaaaggttcagatttctcaggccaggtgtggtggctcatgcctgtaatcccagcactttcagaggctgaggcagtctgatcaattgaggtcagaagttcaagaccagtctggccaacatggcgaaaccccatctctactaaaaatacaataattagcaggcatggtggcgtgtgcctgtaatcccagctactctggaggctgaagcaggagaattgtttgaaccaggcaggtggacattgtagtgagccgagatcacgccactgcactccagcctgcgcgaaaaagcgagacttcatctcaaaaaaaaaaaaaaaaattagctgagcttggtggtggggttctataatcccagctacttgggaggctgaggcaggggaatagcttaaacctgggaggcagaggttgcagtgagctgtgattgtgccactgcactccagcctgagtgacagagtaagactccgtctcaaaaaattaaaaaaaaaaaaaagttcacattcctccatattctttccatcacttattttccttcaaaaaattttttgaattaaaaccttttttgtgggtgtcaagtatctcattgagattttgatttgtgtttctgtaatgattaatgtaggtttctttcattcttgaacatagtttgctgaaaataggatttgggattgagagttgttcctttcagcacttgaaaaatgtcacttctttctggtcttcatggtttctcataagaaatctgctattttaatttttttcctctaaaaatatggtatttctgtcttactactttcaagatttttattttttgtctttaattttatttaattttattttatttttgagatggagtttcactcttgttgcccaggctggagtacagtggtgtgatctcggctcactgcaacctccacctcccagtttcaagcgactctcctgtctcagtctctcaagtagctgggattacaggtgcatgccaccacacccggctaattttggtatttttagtagaagcggggtttcaccctattggccaggctggtctcaaactcctgacctcaggtgatccacctgcctcggcctcccaaagtgctgggatcacaggtgtaagccactgcacccggccttgtctttaattttcgcaagttgggtacaatgtgttacggtgttacgttttggggatgggaagaaagttatcttgtttaaattcactcagcttcttgaatctgtcttttgccaaatttggtgagttcttagcaattactactttaagtcctttgtagtaggggagaggggatgtcttgctctctcacccagtctggagtgcagtggcatgatcacagctcactgcagcctcgacctcctggatttaagcgatcctcccacctcagcttcctgagtagctgggactacaggaatgcaccaagaggcctggctaacttctatattttttacagagatggtatcaccgtgttgtccaggcttccttaagtactttttcagccctgtcttctttttcctctccttccaggatttcaagggcatgaatgttaatcttgtgttacattctcacagttcttcattcttttcatgttatttttttcagtgtactatctctctcttgttcagattgggtagttcctattgttctgtactgcagttcactgattgctctgtctcctctgtttccactctttgtccctccatttgagtttattttagttatattttcaattctatactatttggttattttgtatgtcttctaatttcttgtctggactaattctttgttgagatattgtatctcatttgtttcaagtgtgtgattgttcaggcatttttatgatgtctgcttcatgtatttatcatataattctgacatcattgtcattttcatgctcgtcttttttcatttgagattttcctggttacaattattgaatttccattgaaatgtgcaattttatctattatgagattgtagatcttatttaaacctgttttagctggctttttgataccaccctggcatggggagggcaactgtgccattttgctgtgccacatagggggtgagaatccagatttcccactcaccttctactgacacctgggtggaagtgctcctcctcacggttaggtgtgactgaggagttctggctccctattagtcacctttttatacctctcttataccccagtaagagagacagcggtgccttgttaatgatttccatttgccttccatatacaccacagaggcagggctggccctgttaggcgggatagtagtgaagatcctgactttactatgcctactccgacactggcccagcaggtagtttaacaagtatctttttactgctgcatatgggaatggaaatccagattccccaaatgactccaggggccctacgtaattccatctgcagttatagtcctggctcccttcacagtcttcctgaaaccatcctggcagggaggtcagagtatcttgttacagtctactgagagtagaagtctaggttccctactcagcctttgcaaggtgcatgagtggagtggcatcaggtgttttgagtttctttctttctttctttctttttctttctttctttctttctttctttcctttttttttttcctgtgctttttcgttagagtagatcaattttatttatttatttatttatttatttatttattttttgagatggagtctcacttcttcacccaggctggagtacaatggtgcgatctcggctgactgcaacctctgcctcccgggttcaagcaattctcctgcctcagcctcccaagtagctgggattacaggtacgtgccaccacacccggctaattttgtatttttagtagagaaggggtttccta[131 bp omitted]cggagtctcggtctatcacccaggctggaatgcagtggcgtgatctcaactcactgcaagctccacctcctgggttcatgccattctcctgcctcagcctcccgagtagctgggactacaggcacccattaccatgcccggctaaatttttgtatttttagtagagatggggtttcactgtgttagccaggatggtctcgatctcctgacctcatgatccgcctgcctcggcctcccaaagtactgggattacaggtgtgaaccaccgcgcccggccttgcaattcttatctagacgttttgtcttgctcgggtgcccttttcttggtctgtttctacacagagcatccttttattaggacttttttttctttttgagatggagtcttgcactatcaccaggctggagtgcagtggcacaatctcggctcaccacaacctccacctcccaggttcaagcaattcttctgcctcagcctcccaagtatgggattacaggcatgcaccaccacacccggctaattttgtatttttagtagagacggggtttctctatgttggtcaggctggtcttgaactcccgacttcgtgacctgcccgcctcggcctcccaaagtactgggtttacaggcatgagccaccgctcctggcctgttttgtttgtttgtttgtttgttttttgtttttttctttgggccaataatagataaaccaatgccatgtgcctcctaatgacatgcactgagaaggatacatcattgctgtaatggtatttctgtttaaaatgtataacctgtatctaaaatgaggaaacatcagataaatccaaattgaggttattgagaacaatgattctaattaaatagtatgaaatagagaaaacgtaagtaaatactctatattcctgaattttaattggtgggagtatcactttgaccagtccagcagcaatacacatcactagcacatacattatggtatttatggaccatttcctgctaaaagaaaccaggatttcttgggagaagtggctgattccaagtatgggcagaaaatttttaatgagcctgcagtattttctcataccagataataacaaagctaatttaaaaaatcagtagattaatgacaaagcactgccaacttggaaaggtttccaatgaccaaggataggacaaatcaagcttaaatataaaaataatttatatttgaaacacaccaaatacatttatagttgaataaatataaatctacatttatagttgaataaatataaatctacatttatagttgaataaatataaatctacatttatagttgaataaatataaatctacatttatagttgaataaatataaatctacatttatagttgaataaatataaatctacatttatagttgaataaatataaatctacatttatagttgaataaatataaatctacatttatagttgaataaatataaatctacatttatagttgaataaatataaatctacatttatagttgaataaatataaatctacatttatagttgaataaatataaatctatatttatagttgaataaatataaatttacatttatagttgaataaatataaatttacatttatatttataaaaatttatatttgaaacaccaaatacatttaaattcccaaatttatagcaataccaaagaatcagtgatcacagaacaataaggagcaaagttattatcttaaaaactggtatctaaaaggaaaaaatatatcttggttatcctatgtgaacaataccagtggggggtatccaagtagcatcagtgggcagcttctctttgtgaagtattccagctaatgtatttcaaaattttttcttctggaaataatgtatttgtgtcatacttggtctccaaacctgaaaaaagcaagaaaacagatgttttcctgtaccaggaaaaaaacccaaaaccttggagataagtgatgaattgaaaataaggtacactagaaatatatttcaataatgtttttacacaacttgaaggaggcaaagagagtttagagaataatgaaagaggatgtggtgagggtggtgataaagcaaataggttgtcatcagctctaagatttaagtgttcgaagactactggttccaaatgatggagcagaagaaaactggcttcactgcccaccaacagaaaaccaaaaacaagtgtgcatcaccaagattatcaccaacaatattctagaactcaaatatgaagatgagtcagttctggagctacaaagaagtgaaaaatctctgagcagtggtaggagaatcagacttccacatccatgacacctcttcccccattctgcctggcaccaaacatagaaaatttcccctcaactcatggtttctgtagtggaaaaagtgagattgaggtgcaccaccagcttccccaccatcttgggtgtcctggccttgccttaacccatgggaaactctggtttgtaacttggccagaggagatgcaaaatcagtgtggttaggccaggcgtggtggctcacgcctgtactcccagcactttgggaggccaaggtgggcggatcaggagatcgagaccatcctggctaacacggtgaaaccccgtctctactaaaaatacaaaaaattagccaggcgtggtggcgggcacctgtagtcctagctactcgggaggctgaggcaggaaaatggcgtgaacccgggaggcggagctttcagtgagccgagatcatgccactgcactccagcctgggagacaaagcaagactctgtctcaaaaaaaaaaaaaaaaaaaaaaaaaaaagatatataagagctttatcctctaagcccaacatgtagatcttgtttaaactcagtgtggctgttcagcagcagcatgctgtaggaggttcattccacagatctcttgggcacaaacccctagccagccctcccacacggccagaataccctctttgggacctaccccattaaggaagtgaattgctccaaccgttactaaagctaaggcgaaccaggttttaaggcaccacctagagctgaaaaggaggcagcaacctcatgataaaaaaacctctaagccaatatgtccagtaaaaattgtagg[140 bp omitted]gggtgtggtggcgggcgcctgtagtcccagctacttggaggctgaggcaggagaatggcgtgaatcgggaggcggagcttgcagtgagccgagatcgcgccactgctctccagcgtgggtgacagagcgagactccgtatcaaaaaaaaaaaaaaaattgtaacaagccagtcagagaacattggaataaataaataatacttcaatgcaaagacatcaatgtacatccataagcaacatgcctaaagagggaaccatgatctcaccaaatgaacaaagcaagaaaccagtaactaactcatcctaacaagatggcaatatgtgagctgtctgataaaaattgaaaatagcagttctaaagaaacttagtgatttccgagataagactgaaaagcaattcagaaatgtatcaaagaaatttaacaaagaaattgaaaaaaataaaaaaacggaaatcaaatcttgcaactaaaaaatgaaatttctaaacagaattcattataggctctcaatggcagaatgggtccaatagaagaaagaatccatgagctccaaaataagttatttgaaaacacaaagtcagaggggaaaaaaaagaacacagaatgaaaaggaacaaagatcatctacaagatgtagaacattacctcaatagaccaaatttaagaatcattgatgttgaggaaagagttgaataagagacaggggtacaaagattatttttaaaaatattaataactttccagtcttctttggaaagaaaactttccaaaacttgagaaagatatacatttccaggtacaggaaggtcagagaacaacaaacagagttgacccaaatatgattaccccaagtcatataataaactctcaaaggtcaaggaaaaagagaggatcctgaaagcagtaagagaaaataaacaaatggcatttaaaggagctctaattcatctggcaacagacttatcaatggaaaccatacaggacaggagggagtcaaatgacattttagaagtgccataagaataaacattgccatccaagaataccctatccagcaaagttagctttcaaatatgaaagagaaagtttttcccagacaaacaaatgctaagagaattcaccaccaccatacccctgttacaagaaacgctaaagggaatttttgttttttcttttttgtccttttcttttttattttttgagacagggtctcactttgtcacccaggctggagtgtagtggtgcgatcttggctcactgcagcctcaacttcccaggttcaagcaatcctcccacctcagcctctcaagcagctgggactacaggtgtgtgccaccatgtccagctaattttggtattttttttatagagatggggttttgccatgttgcacaggttggtctcaaactcctgagctcaagtatctgccctccttggcctcccaaagtgctaggtttacaggcatgagccactgcacacagcctaggagtttttcaatctgaaagaaagaacattaatgtgcaaaaagttttttcaaagaaggtacaaaacccaccagtaaaattaagtaaacagacaaacccaggatactctactactataaatgtgtgtaattcacttataactctagcatgaagcccaaaagacatatctatcaaaaacaataatggccacagcaacctcttaagagagaggtaatataaacatatgtaaatttggagaactaaaagtaaaaatatggggggaaagggttaaagtgtggaaaattttttccatttttctttatttctattcttttatttgtgatctaagataggttggcacctctttaaagtaatttactgtatctatactatgttttttgtaagcctcatagtaaccacaaagcaaaaacctatgaaagagtcactaaaaataaaaagcaatgaattaaaacaccttaccagagaaaaatcgcttaattacaaagggacacaggaaagaagaaaggaggagaggagtaaaacaggcaacaaaatggcacttttaagtacttatttatcaaaaataatactaaatgtaaatgaactcaattccccagttaaaggcatacagtggctgaatgaataaagataaaacacaactatatgctgctgccaagaaacccacttcacctataaaaatatgcacagattgaaagtgaagacatggaaaaagataccccatgcaactggaaactagaaaagagcagaagtagctatagttttatgaagtaaaatagactataaatcaaagacaaaaaagagacaaagatggtcactatataatgattaaggggtcaattcagaaacagaatataacaattacaaatatatttgcacacaacactggagctcccatgtatataaaggaaacaatatagctaaagggagagatggactacaatataataatattaggagatttaacacaccattttcagtaatggacatatcatccagagagaaaatcaacaaatattagaggtaaactacacactagacctaataggcctgatatttacagagcatttcacccaactgctggagaatacacattcttttcattagtacatggcatattctccagaatagaccatatcttcgaccacaaaacaagtctaaacaaatgtttaaaagtagaaatcatatccagtatcttttctgaccacaatggaataaaactagaaataaataacaagaggaacttcaaacacttcataaacacatagaaattaaacaacatattaatgaatgaccaatggatcagtgaagaaattaagaaggaaatttaaggccagacacagtggctcatgcctgtaatctcactactttgggatgctaggcaggaggaaggcttgagtccaggagtttgagaccagcctgtgcaacatagaccttgtccctactaaaaattaaaaaattgactgagcatgtggcatatgcttatagtcccagctacttgggagcctgaggcaggaggacgcttaagctgaggaggttgaggttgcagtgagctatgatcataccactgcactgggcaacagagcaagaacatatcccaacaaaaaaaggaaattttaaaatatcttgaaacatatgaaaatggaaatataccaaaatatatgggacacagcaaaagcagtattaagaaggaagtttatagaaatacatgtctatatcagaaaactagaaacacttcaaataaacaatctaatgatacacctcaaggaactagaaaagcaagaacaaaccaaacccaaaacagtagaaggaaagaaataataaagatttgagcagaaataaatgaaattgaggctaaaacaacaacaacaacaaaaacaggctaggcacggtggttcacacctagaatctcagcactttgagtggctgcagcaggtggatcacttgatgctaggagttcaagaccagcctgggcaacaaagtgagacccccatctctacaaaataaaataaaaaattttactcaggcacagtggcaagtgcctatactcccagctacttaggaggctaaaggcaggaggacagcttgaccccatgagttcagagggtgcaacaagctttgattgtgtgactgcactctagactgggcaacagagtgagaccctatctctaaaaaaacagaaaaggccaggagcagtagctcacgcctgtaatcccaacactttgggaggctgaggcgggcagataacctgaggtcgggagttcaagaccagcctgaccaacatggagaaaccctgtctctactaaaaatatgaaaattagctgggtgttgtggcacatgcctgtaatcccagctacttgggaggctgaggcaggagaattgctcgaatgccagaggcagaggttggggtgagctgatatcgcgccattgtactccagcctggggaacaagagcaaaactccatctaaaaaaagaaagaaaaaagaaaatgcagtagatcagtgaaataaaaagttgattctttgaaaagataaagtcaacaaacctttaggtagactaagaagaaaaaaaagatccaagtaaataaaatcagaaatgaagaaggttgttgggcatggtggcttatatctgtaatcccagcactttgggaggccaaggcaagaggagcacctgagcctaggcaatgcagtaagaccccatctctacaaaattagtcccatctctaaaaaattagccaggcatggtggtgcacgcctatagttccagctacttgggaggctgagtcgagaggatccttccagcccaggagttcaagactgcagtgagctatgattgtgccaccgcactccagcctgggccacagagggagagatccagtttgtttttcttaataaaaggacacataataacagaccacaaagaatcatcagagacaatcatgaacaactatatggcaacaagttggaaaacccagaagaaatggataaactcttggagacataccacagattgaagccataataaaatgtctaccattgaagaaaagcccaggaccttatggcttcactgctgaatcaaacatttaaagaagaactagtaccaattctactgaaactcttcacaaaaattgaagaggagggccagcataactctgataccaaaatcagacatgagtacaacaaagaaagaaaacgacatcttcactgatgaagaaagatgcaaaaatccttaagaaaataata[133 bp omitted]tcaacatggtgaaaccttgtctctactaaaaaacaaaaaaattagctgggcacggtggcatgtacctgtaatcctagctgctggggaggctgaggcaggagaatcacttgaacctggaaggcagaggttgcagtgagctgagatcgtgccactgcactccagcctggggaacagagcaagactctgtctcaaaaaaaaaaaaaaaaaaaaaaaaatcattcaccttgatcaaatgaaattcatcccagggatgcaaggatggctcaacatacacaaatcaataaatgtggtacatcacattcacagaatcaaaaagaaaaaccacatgattatttgaatagatgctgaaaaagcatttgataaaattcaacatccgtttatgataaaaaccctcatcaaagtgggtatagaaggaacatacctctagataataaaggccatatatgacagacttacagctaacattgtactgagtggggaaaaattaaaggtatagtagggagaccccatgaaactattgctatggaataaaagatgaaatgctcctgattattgtaaatacaaagttgcatgcaggattgtgtaaaaacaatgccaagttggactgccagaatgagccaacagcacgtgatgtgctttcctctgcagagagcctataaacggacgtgcagtcagggaggtttcacatcaccaagattcctatcccagaaaagcagatgttcatagctctgggaatggaatgcgacccttgtggagagcctataaatggacgcatgggggcgcctgttcatatggataagatagggctataaacgccctcatcttgccacagctcttctaggtctctttagggttaaggcatactcccttctgagaatttctggtctaaccggttgtctggcttcacgtcctgtttctatggattgtttgtaaccagcttttgctgcaactgttactgctgattaatatcttgctaatcataggttatggagactgcgtttctgttttaaggctctgttagaaattactgatgcacactattgtaaattcttatctctgtatactgtacttctgcatacagatgttatgttaaagaattacttcatccccatgtgaccatctcacctcataatcaaatgaccctaaatccctcactaacctacccccgccctcattaaacttagtaataaatgctggtatatccagtgcattgttggcaccgcgggaccagaaggtggtgacccccctggacccagctttcactatcttgtgtgtgtctattatttctcaacctgccgatccgcctgggaacaaagagagagccccgttgcattgcaggctactggccagatcccgcaataaggtatgttctctaagatctgaaacaagatagaaatgctcacctttaccacctttattcaacatagtgctggaaatcctggcaagagcaattaagcaagaaaaaaaagggcgtccaaattgaaaaagaagtcaaattctgcagaagacatgatcttatatacttaataacctaaagactccaccaaaaaaccgttagaactgaaaaatgaattcagtaatgttgcaggatacaaaatcaacatatcaaaatcataacatttaatatacactaacagcaaataacctgaaaaaagaaatcaaggaaagcaatcacacttaagaagctacaaagaatagaaaatagctacaaagtatagaaaatacctaggaatcaagttaaccaaagaagtgaaagatgtatatgaggaaaactatgaaaaactgatgaaagaagtagaagatgacacacaaaaaaggggaagatattccatgctcatggattagaataattaaaatgacaatactactcaaagcaatttatagattcaatatgatctctatcaaaatgccaatgacattcttcatagaaataggaaaaaaatcctaaaatgtatgtagaaccacaaaagaccctgagtagccaaaggaattctgagcaaaaagaacaaagctggagacatcatattacctgacttaaattttctacaaacctatagtaaccaaatcagcatagtactggcataaaaacagacacagaccaatgtcatagactagagaacccaaatatcaatccatacatttacaaccaaataatctttgacaaaggtgccaagaatatacaatggggaaaggaacgtttttttcataaatggtgctgggaaatttggataattacatgcagaagaatgaaactagacctctatctttaccatacacaaaaatcaagtcaaaatgtaagacctgctactagaagaaaatattggggaaacactcacagacattggtctacacaaagacttttttatataagaccataaaagcacaggcaacaaaagcaagactccaccaaaaaactgttagaactgaaaaatgaattcagtcagacaactgagattacatcaaaataaagtttctgtgcagcaaaggaaacaatcaataacatgaagagaccacccacaagacgggagaaaatatttgcaaacaacccatctgacaggggattagtattctcttatataattatatatatgagaatatataagaacatataaggagctcagacaactcaatagcaaaaaaaaaaaaaacccaattaaaaaaaatgggcaaaagatctgaacagacatttctcaaaagaagacatacaaatggccaatgggtatatgaaaaaaatctcaatatcactaatcatcagagaaatgcaaatcaaaactacaaagagatatcatctcaccccaattaggacagctattatcagaaggacaaaaaaataacaaatgctggcaaggacgcaaagaaaagggaacccttatatgctgttggtaggaatataaactagtatagctactatggaaaacagtttggaggtccctcaaaaaactaaaaatagaactatcatatgatccagcaatcccactgctgggcatatacccaaaagaaaggaaatcagtatatcaaaaagacaactgcactccatgtttgctgcagcactgtccacaatagccaagatttggaagcaacctcagtgtccatcagcagatgaatggataaagaaaatgtagtttgtgtacatgagggaataatattcagccataaaaaaagaatgagatcctgtcatttgcaacaacatggatggaatttgagatcattatgttaagtgaagtaagccaggcacagaatggcaaacatcacaggttctcacttatttgtggaatctgaaaatcagaacaattgaactcacagacagacagagtagaaggatggttaatggaggctgagaaaagtcatgggggaagtgatgagggttaatgggtaaaaaaagaatgaataagacctactatttgataacacaacggggtgactatactcaataataaagtaattttacatttaaaaatacctaaaagagtataattggattatttgtaacacaaaagataaatgcctgagaggatggataccccattctccatgatgtgattattatgcactgcattcctgtatcaaaacatctcatataccctataaatatatacacttactatgtacccacaaaagttacaaattaaaaaaaattaaaaaagattttaaggccgggcacggtggctcatgcctgtaatcccagcactttgggaggccaaggcaggtgtatcacctgaggtcaggagtttgagaccagctttaccaacatggcgaaacctcgtctctactaaaaatacaaaaaattagctgggcatggtggtgtgtgcctgtaatcccagccacttgggaggctgaggcaagagaatcgcttgaacctgggtagcggaggttgcagtgagctgagatgttgccattgcactccagcctgggcaacagagcaacactctgtctcaaaaaaaagaaaagaaaaaagatttaaaaaaaccacagccaaatagcaagaaggagtatactgaatattcccaacaacaaaaaagatgtttgaagtggtggttatactattaataattaccctgatctgctgactatatgttatgtgtaccaaaacatcactatgttccccacaaatgcgtacaatttttctatgtcaatttcaaaaataaaatatttgtgaaaaaaaagaacatgataaggccaggtgtggtggctcactcacgcctgtaatcccagcactttaggagactgaggcaggtggatcacttgagctcaggagttcaagaccagcctgggcaacatgatgaaaccctgtgtctacaaaaaattagcaggatacagtggcacatgcctgtagtcccagctacttgggaggctaaagcaggagaattgcttgagcccgggaggcagaggttgcagtgagccaagatcatgccactgcacttcagagcctgggtgacagagtaacactccccccactgccaccccccaaaaaagaacataatacataaagaatacatgtatattatagacattagagcaaatcctaaaaaatataaaaacaaagaggtataactaataaaccatagtagagataaaatggaatcataaaaaacaattgtaaagaagaaaggaaaaggccaggcatggtggctcacgcctgtaatcccggcactttgagaggctgaggcaggcagatcatgaggtcaggatatcaagaccatcctggccaacatggtgaaaccccatccctactaaaaatacaaaaaattagctggccatggttgcgtgcacctgtaatcccatcttgggaggctgaggcaggagaattgcttgaaaccgggagttggaggttgaagtgaggcgagatcaccccactgcactccagcctggtgacaaagcaagattccacctcaaaaaaaaaaaaaaaaaaaaaaaaaagaaggaacaaacaacagttaggacaaaacaaatggcaagctagtggaactaaatctaaccatactgatacttacttgagatgttaataatctaaaccagggatcagaaaactttatcaataaagggccagagtgtaaatacaagttttctggacccacagagtctctgtcaaatcattcaaccccttagttgtagcagaaaagcaatttaaaacatgtaaacaaatgagcatttgttgtattccaacaaagctttatatataaaacaggtgacaggctggatttatcctgggaaccatagtttgccattccctgacctaaacactccaactaaagacagagattgtcagattgtataaaaatgtaagaacacagccaggcctcatggcacgtgcctgtagtgctagctactggggaggctgaggcacaaggattgcttgagcccaggaggttgaggcagcagtgagttgtgactgcaccactgctgtccagcctcggtgacagagcaaaaccgtgtctcaaaacaacaacaataacagcaaaacaccaaactaaaactatacattgtctacaagacacccactttaaatttaaacacctagatagtttaaaagtaaaaaaaatgatgggaagagctataccatgcaaccaccaatcatggctatattaatatcagacaaagtagacttcagaataaggactgttacaaggaacaaagagggaattttataatgataaatgggaaaaacaatcctgaatgtgtaagtacatgataacagagctccaaaatgcacagattaaaaacagataaaactgaaaaagatatagagaaatacacaattatagttagatatttcaacactcccctatcactgatagaacaagtagacacaagactaattttaaaaggagaaatattctgtgattccacttttgtgaggtacttagaacattcacatttatacatacaggaaatagaacagtagtcaccagaggttaggagattggggaaatgggaagtgttgttagaaaggcttacagtttcacttttacaaaatgaaaagggttctggagatggacgttggttgtacattatgaatgtacttagtactgactgtacacttaaaaatagttaagatggttaattttatatgtattttacaataaaaattttgaacaaaatattaattggttttttgagaagatcaataaaattgataaacctctaagcagactgatcgaaagagagagagaacacacaaattgccaatgtcagaagtgaaagtgtggacatcaaaactacaggctgggtgcagtggctcatgcctgtaatcccagcactttggagggccgaggcgggtggatcacctgagatcaggagtttgagaccagcctggccaacatggtgaaaccccgtctctaaagtacaaaattagctgggcatggtggcacttacttgtaatcccagctacttgggaggctgaggcaggagaatcgcttgaaaccaagaggcagaggttgcagtaagctgagattgtgccattgcactccagcctggaaaacgagagtgaaactccgcctcaaaaacaaaaacaaaacctacagttataaaaagcagatctggctgggcgtggcagctcacgcttgtaatcccagcactttcagaggccgaagcaggcagatcaccggaggttgggagttccagaccagcctgaccaacatggagaaaacccatctctgttaaaaatacaaaattagccaggtgtggtggcgcatgcctgtaatcccagctacttgggaggctgaggcaggagaatcacttgaacctgggaggcggaggttgcggtaagccaagttcgcgccattgcactctaccctgggcaacaagaccaaaattccatctcaaaaaaaaaaaaaaaagaagaagcagatctgcagttgaagcaagctgtgaataagcagggagggaaggaccgactgcaaagggacatgaggggactttttgggatgatggaaacatcctctatgattgtgatggtagctaaacaaataccgatatcaacattaatcaagttgttcatttcaaagtatgaattgtaatctatgtaaattatacctcaaccaacttaacaaaaatataacaagtcttgaggtcttgtctttgaatagtggaagatacaatctctggctaaatataggcccaagtggttttatttatagcttgacatagttcctttattaaaatttgtttttgttttttgagacagtcttgctctgtcacccaggctggagtgcagtggcgagatcttggttcactgcaacctccacctcctgggttcaagcgattctcctgcctcagcatcccaagtagctgggattacaggcgcccaccaccatgtctggctaatttttgtatttttagtagaggtggggtttcaccatggtggccaggctgttcttgaactcctgatctcaaatggtccacccacctcggcttcccaaagtgctgggattacaggtgtgagccaccatgcccagctaaaaattgttttaattaacaaaaccataaacgtacagcaatcatccttaatggcgaacattaaaaatatttccttggccaggaacaatggctcacacctgtaatcccagcacttcaggaggccaaggacggcagatggcttgagcccagaagttcgacagtggcctcgacaacacggcaaaaccccatctctgcaaatacaaaaatgagccgggcatggcagtgcacacctgtagtcccaggtacttgggaggctgaggtggaaggactgattgagcctgggaggttggggctgcagtgagcagtgatcatgccactgccctcaagcctggtgacagagtgagaccctgtctcaaaaaaaaaaaacaccaaaaaaaaaaaaaacctcacttaaagaaagggtcaagtgaggaaactagttagtgctgtagacattcatattacacatatgatccaagctacaagtataaattaagaaataaggcatatagaaaggaataggcaaatacttttatttacaaataataccaacatctctttagacaattcaatctcatgaagaaaccatttcatctactaaagtagttcatcaatgttacaatccttagacaaaaaccaacagtttagtacatagtaatagtaatcaattacacaacagaaaaaatatcccaatcatattataaacaaaagccattaagtatctagaaataagtaaaacaagaaatgtgtacacttttatgctaaaaatataaagacttactaaagcacataaaagaatacctactgaaataaagacacaccaggtacaagagaaaaactcaatgtcgtaaagatgtcaataatgattcttttctttctaatactatggcagaggagaaatattgaaactcctctattaaaaggatttaccggccgggcacgtggatcctgcctgtaatcccagcactttgggaggccgaggcagtcagatcacctgaggtctggagttcaagcccagcctcaacatggagaaaccctgtctctattaaaaatacaaaattagccgggcgtggtggtgcatgcctgtaatcccagctactcaggaggctgaggcaggagaattgtttaaacctgggaggcagaggttgcggtaagccgagatcgtgccattgcactccagcctgggcaacaatagcaaaactcccgtctcaaaaaaaaaaaaaaggatttaccccaaatagatcatctttggtcaataagaatatacaggtgatctttctgtcttcattgtgcttttctctgctctttaaaaaattctacttttttcataaaaagagttaatttttaaaagtgaaaagtaaaaacgttaagagtattggctgaacacagtggctcacacctgtaatcccagcacctaggaggctgaggtgctaggaccaattgagcccaagagttcaagaccagcctggacaacatggtgaaaccctgtctctacaaaagatacaaaaattagctaggtgtggtggtgtgcgcctgtagtccttgctactcgggaggctgaggtgggggatcgattgagcccgggaagttgaggctgcagtgagccaagattgtggcattgcactccagcctgggcaacacagcaaaaacctgtcacacatgaaaaagacaactgtgaactgtaaaaagcactcctccatcttcaccctctctgtatatatttatgtttaaatatctccaaggaagcagttacaaaaacatggagaataataaatgacagagtaagaatttgagaacaaacatttgatttgtttccataaattgagaca[137 bp omitted]tggtgaaattccgtctctactacaaatacaaaaaattagccaggcgtggtggcgggcacctgtagtcacagctactagggaggctgaggcaggagaatggcgtgaacctgggaggtggagcttgcagtgagtcgagatcacgccactgcactccagcctgggcgacagaacgagactgtctcaaaaaaaatcaattgagacaaagcctcaattgattaaccttaaaataaccttcttaaaagatatgtgtgtgtgtgtgtgtgtatataaatcatccataagcatattagtaaaagtacaaatcaacagatatgttttagagaagtgttaaattttttaaacgcaagtgtaatttaaatagaatgaaatacaacaatccgaagtgcatagacgatgaggtaagatttttttcatcaactttattgaagtgtaatttacatataataaaatgcaaccatatgtctacattcatgcaaataccaccttgtaagaaatgcctttcctgactaccttatctaaattagtcctgcccagagttcagagaccagcctgaccaacatggagaaaccccgtctctactaaataatacaaaaattagtcgggcatggtggagcatgcctgtaatcccagttactcaggaggctgagtcaagagaatcgcttgaacctgggaggcggaggttgcagtgagccaagatcgtgccattgcactccagcctgggcaacaagagcaaaactccatctcaaaaaaaaaaaaaagaaaaaagaaaaagaaagtcccaggtgcagtggctcatgattgtaatcccagcactttgagaggacaaggtgggccattctttatattcataaggtgggaagattgcttgaagacaggaattcaagaccagcctgggtaacaaagcaagactccaactctactgaaataaaaaataaaaacttagctgggtgtcatggtgctgctgggagtatagcagtgaggacgaccagaggtcactcttgtcaccatcttggatttggccgacttctttactgcaagatgttttctcagcaaggtctttatgacctgtatcttatgctgacctcatatctcatcttgtgacttagaatgacttatctgtctaggaatgcagtccagtaggtttcagtgttactttacacagctcctattcaagaagaagttgctctggtttacacgcctctgacgtaaccatgcagtgaacaagtctattggctccatttattcaccagcatgtgctcactttgtatctgtgtcatatttggatgatcccaacaatatttcaactttctcattgttgttatatctgttatggtggcctatgattatcttaggcaccactacttgttttagggcatcacaaactgtgtccatataagacagcaaacttaattgataaacatggtgtgtgttctgactacaaacttaattgataaacactgtgtgtgttctgactgctccactgactggctcactgcaacatccgcctcccaggttcaagcgattctccagccttgcctcctgaatagctgggattacaggcatatgccaccatgtctggctgattttgtatttttagtagagatggggtttcaacatgttggccaggctggtcttgaactcttaacctcaggtgatccacccacctcagcctccgaaagtgctggcattacaggcgtgagccaccacgcccggcttggaatttctaatataaattgcccactggatccaaaggagaaggtgcgcacagactttagttttgcttgctttctttccagcaaggactttcttagccacctttgcagttatgggctaaagtagacagggaaatagacagggaaggcgaagcttaaaacaaagtcagtagtcaaacatgaaaaatatagtcacacttatttattataaaaaaactattactagccaggcgtggtggctcacacctgtaatcccagcactttgggaggccgaggtagggggatcacgaggtcaaaagtttgagaccaccctgaccaacacagtgaaaccccgtctctactaaaaatacaaaaattagccaagcatggtggtgcatgcctgtaatctgagctactcaggaggcagaggcaggagaatcacttgaacccaggaggcagaggttgcagtgagccaagatagcaccactgcactccagcctgggcaacagagcaagactctgtctcaaaacaaaacaaacaaacaaaaaatacacaaaaacaactattgccatcaacattttatcaattagtaattttggcacagagaatttacataactagcctaatgtcacgtaggtagtaaatggttgtcttttgtcattgaccacattctctaatatgaatttgtataacttcaataagctttgaatcatgatagaaaactcatctacattcattatcaatttctttcagtattaaatgtcctaattttggtgggtggatcaccaggtcaggagatcgagaccatcctggctaacacagtgaaaccctgtctctactaaaaatacaaaaacaaaaaaattagccaggcgtggtggcaggtacctgtagtcccagctactagggaggctgaggcaggagaatggcatgaacccaggaggcagagcttgcagtgagccgagatagcgccactgcactccagcctgggcgacagagcaagactccgtctcaaaaaaaaaaaaaaaagtcgtaattctggaaaaagtgaatatgaagtaatacacatccattgtatttgacccacatatggaatctgctgatgatccatgacaaatggcatgagaacagtttcctacattaattatgttaggtcatgaattctctgatgtcgagtaagctgtgtaagctgtttaaaggccttcccacatgtcttacattcatagggtttctcgccagtgtgaacactctgatgtcggctgagtcctgaggcatagaaaaaggctttcccacattccggacattgataagttttctcaccagtatggattcgtttatgttgactaagttgtgaaggacatctaaaggccttcccacattccttacaatcataaggtttctcaccagtgtgagttcgctgatgtcgaattagttctgagccgcaagtaaaagatttcccacattctttacattcataaggtctgtcaccggtatgaattctctgatgtagagtaaggtgtgtacgctgtctgaaggacttcccacatgtcttacattcatagggtttctcgccagtgtgaatactgtgatgtttggtgagtcctgagaaacggacaaaggcttttccacattcatgacatcgataaggtttctcaccagtatggattcgttgatgttgagtaagttttgaacgacgtctaaaggccttgccacattccttacaatcatagggtttctcaccagtgtgaattcgccgatgttggattattgctgagcgaaaagcaaaagattttccacattccttacaatgatagggtttctcaccagtgtgaattcgctgatgttcaattagtgttgagcgagaagtaaaagatttcccacattctttacaactgtagcgtttctcaccagtgtgaactggccgatgttgaattagtgctgagcgaagagtaaaagatttcccacattccttgcaatgataaggtttctcaccagtgtgaagtggctgatgttgaattagtgttgaatgagaagtaaaagatttcccacattccttacaatcatagagcttctcaccagtgtgtatttgctgatgttgaattagtgttgagtgagaagtaaaagatttcccacattccttacaatcatagggtttctcaccagtgtgaatttgctgatgttgaattagtgttgagtgagaagtaaaagatttcccacattccttaccatcatagggtttctcatcagtgtgattttgctgatgttgaattagtcctgagcagaaagtaaaagatttcccacattctttacattcataaggtttctcaccagtatgaattctccgatgttgattaaggtatgtacgctgtctaaaggccttcccacagtccggacattcatagggtttctcaccagtgtgaattctgtgatgttgggtgagtcctgagacactgacaaaggctttcccacattcctgacattgataaggtttctcaccagtatggatttgttgatgttgagtaagtcgtaaacgaagtctaaaggccttcccacattccttacaatcataaggtttctcaccagtgtgaatttgctgatgttgaagtagtgttgagccaacagtaaaagattttccacattccttacagtgatagggtttctcaccagtgtgaattcgctgatgttgaattagtgctgagcgagaagtaaaagattttccacattctttacaatcatagggtttctcaccagtgtgaactgcctgatgtccaattagccctgagcgaaaagtaaaagattttccacattccttacaatgatagggtttctcaccagtgtgaattcgctgatgttgaagtagtgctgagccagaagcaaaagattttccacattctttacaattatagggtttctcaccagtgtggattcgctggtgtcgattgcgtgttgagcgaaaagtaaaagattttccacattccttacaacaatagggtttctcaccagtgtgaatccgctgatgttgaagtagtgctgagcccgaagcaaaagatttcccacactccttacaatcatagggtttctcaccagtgtgaattcgctgatgttgaattagtgttgagccagcagtaaaagattttccacattctttacaatcatagggtttctcaccagtgtgaattgcctggtgtccaattaaccctgagcgaaaagtaaaagatttcccacattccttacaatcatagggtttctcaccagtgtgaattcgctgatgtcgaattagagctgagtgaaaagtaaaagattttccacattccttacagtcatagggtttctcaccagtgtgaattcgctgatgtcgaattagtgctgagcctgaagcaaaagattttccacattccttacaatcatacggtttctcaccagtgtgaatttgctggtgtcgaattagtgttgagccaacagtaaaagattttccacattgcttacaatgatagggtttctcaccagtgtgaatttgctgatgttgatttagtgttgagccagaagtaaaagatttcccacattctttacattcataaggtttgtcaccagtatgaattctccaatgttgaataagatgtgcagacggtctaaaggccttcacggattcctgacactcatgaggtctctcatctgtatacattttctggtgttgaataagatgtgagccagaaataaaagcttttccatattctttacatgcacagggcttttccccagtatgaattctctgatgtttaacaagataggaaaagtgatgaaaggccttcccacactccttacatttatagagtttttcaccagtatgggtttcttgctgttgtgtaagttctgagccatacttaaaagccatacattctgtggatttatacagtttctctccaggatgaatccgatgatgcagagtgagagatgtctgtaggcagaaagttggtgttgtttcataagtcattattgctttttccaaatatcgctcctgatttatatcttggtgctgaaactggcctttgcattcccagtcatctctgacactggagcccacaaggctatgacatttttccattctcacccactgagatgatgttacttcatagatttcttttggcaaacatgaatctttggtcttacatctaaactccgagtctgaaaaataaccagaaagcaaaaacatagcatttccttgttgagtagaaataaaaacatctatggtagaaaggggagacaaactgaaaataatgtccttaagaattaaagatgtgttgggcgtggtggctcatgcctgtaatcccagcgctttgggagtctgagacaggaggattgcttgagcccaggagttcaaggctgcagtgagctgtgattgtgccactacactccagcctgggccacagagcaagaccctgtcttaaaaaaaaaaaaaaaaaaaaaaagatggtgtacatacatggtatacatggtgatagtatgtacccttatatgatgtgatgagaacagtattttatctctgtgatcttccttctaaaaatactgaactccagtctaatcactggaaaaacaccagacaaatcccaaaatgagagacaatctatgaaatacctggccagtactctccaaaactattgagataatcacaaacaaggaaagcctgaaaagctgtcaaagcaaagaggagccaagggaaacataatgactcaatgcaatgtgttagcctagccaagatcctagaataggaaaaaaggacattaggtaaaagctaaggaggccaggcacagtggctcacacctataatcccagcactttgggaggctgaagcgggcggaccacaaggtcaggagttcaagaccagcctggccaacatggtgaaaccctgtctctattaaaaatacaaaaatgagccagacgtgtggcccatgcctgtaatctcagctactcgggaggctgagacaggagaatcacttgagcccgggaggctgaggttgcagtgagccaagatcgtaccattgcactccagcctaggcaacaaaaaccagactccatctcaaaaaaaaaaaaaaaaaaaaaaaaaagctaaggaaatctgagtaaagtaggggtttccattaataataatagatctcagcaccataggaaaggtaaataataataacaacattgcttcaacaatgttattatttaataggatcaacattcattcattaattatgacaaatgtacaaatataaaatgttaatgggaaactacatgtgatgtatatgggaagtctctgtactaacctcacaacttttctgtaagtctaaaactatcctaaaacctaaagtttacttttttaaagtgagaaagtaacatctcactagcaaaaaggccaagcaaatttttgtaaaagacacaaatggggtatcagtatctaaaaattaaaaaatgaatcattgaaacttaaaattcaatgaatgaatttgaattggcagtataagagtgcaatcatgatttttaaaaaatactatacatcttcatccattgaagccttagaaacaaccaatctggcagcaatgaacacgctaatgacagattactgtctctaaataccatttcttactacacagaacctaggctccttggagcatcttgggattagaacagaaagtgtgcattatgagcatggaaaaagctggcatattagaaaagcaaagaagcttattcaagactcctagggtcatgtcaaaaagactcaggaaccattgtgaagagggtcccattggccaaagatgggacaagttgagcatgaattcaagaataaaaactgtaatcattgtaatgtaattacaataaatcacatcaaatttttttaaatctgtgtgttcataaggacaattttaaaattacctagtaatttttaggggatgagatgaggaatggctgctaacttcacaaaaacagaaacaaccagatatgtgcttcttgatgaaatacacaatactaatatcacatagtctgtttataggaaagaaaggagtaaagggaggagagctaaatgttaaatgacagatgatccagtttcttcaacatataaatttcaaggagaaaaagagaaagaaatcaacaacaaaacctcactggaatggttaaataactggaaatgcaaaagcaaggttaaaagtcataaagaaaagtcaaagaattcatttgtcttcctgaaagtaatactgaaagaacagggagcaaactatattcaagatggaacagctaaaatttattcagaagtgatgaggttttctaaaaaaaatctgaggtgccatgagtgccatggatggtaaattttaaaagttctacggggccaggtgcggtggcacacgcctgtaatctcagcactttgggagtctgaggcaggtggatcacctgaggtcaggaattcaagaccagcctggtcaacatgacaaaaccccgactttactaaaaatacaaaataagccaggcatggtggtgcacgcctgaattctcagctactcagggggctgaggcagaagaattgcttaaatccaggagacagagtttgcagtgagccgaaattgtgccactgcattccagcctgggcgacagagcgagacttcatctcaggaaaaaaaaaaaaaaaaaaaaagtaaaagttctataagccaggcatggtggttcatggctctaatcccaacactttgggatgccaagactgcaagattaccagagcccaggagttcaagaccagcctgggcaacagcctgggacactgtctcaaaaaaaaaaaaaaaaaaaaaaaagccgggtgtggtggcacatgcctgtagcctcaggtactcgggaggctaaggcgggaggatcacctgagcccggaaagtcaatgctgcaatgagctgtggtcaagccactgcactccagcctgggtgaccacgggagaacctgtctcttaaaaaaaaattatgcatgatgaaatcccaataataagaacaaaatggacaggaaaaaaaaaaatagcttacacaccatgcttgctatatgccaggcactattttcactgctttacacatttactatataagctcatttaatcttcagaagaatcctgtgaatagcatatatatttgcaaatgaggaccagagaggttaagtaaattgccaaaagtcatagaggtattaaatagcagagctaggatttgaatggaggcaatctggctcaagagtccatgctttcaacttccaaatcagtggaatcgaactaagtatgggcatcagatttttttaaaacctcaaatctaaaacagtgtaaaataaaacaggcaacagaagacaggaaaagtgagacaaatagaataagctggttaaaaaaattcaaacaggccaagagaggtggattgtgcctgtattttcagctactcgggaggctgaggtatgcagattgcttgagcctagggggttgaggctgtggtgagctgtgattgctccactgcactcagcccgggcaacagagagagagagaccctgtctcaaaaaaaaaaaaaaaaaaatccaaatacatcactaattataaggaatgtaaacaaagaaaaagtaaatttcaacccttttaaaataaaaagtgactaaaaacatgaggacacaaaaaagttgaagtaaaaactaagaaaatgaaaatcaggcaagtattcatgaatagaaagctagggtcttagcactggaaaaaaatagactttaaggtgaaaacattcttgggaataaagaggattactacataataaaacgttcattcaccaaaaagatataacaattctaaatttgtaagcatccagtaaaataaactctaaatatgcaaagtaaaaattgagaaaatacaaaaagtttaggcttcatcttgattgtgggagatttcttttttttagttattttttttgagatggagtctcactctgtcacccaggctggagtacagtggcacgatctcagctcactgcaacctctgccctccgagttcaagcgattctcctgcctcagcctcccaagtagctgggattacaggcgcctgccaccacgcccggctaattttttgtatttttagtagagatggggtttcacca[133 bp omitted]tgagaggtcaagcacccagaaaatataaaaggatacagaggatctttacatcaaattaacaagcatgatatgttgaacatgtgagaattctacacgcagcaattaaaagaaagcacaggaacacgtgaatccccacccccacaaaaacactgacaattcagcagtgcgtgaagtaagtctgaacacacttccagaaactggtctcatactgaccatgtaaatattgactatagtgcaattaaggttgaattcaggaataaaaaatgggaaaagaatttaaatgcaaaacatttacaaaagcttatgggttaaaaatggcatcatgcaaattaaaaaattctttttcggtttttttgagacagagtctcgctctgtcacccgtgccggaatgcagtggtgcaatctcggctcactgcaacctccacctcccaggttcaatcagttctgtgcctcagccatttgagtagctgggattacaggcatgcaacaccacacccagctaatttttgtatttttagtacagaaagggtttcgccatgttggccaggctggtctcaaactcctggcctcaagtgatccacccacctcccaaagtgttgggattacaggcatgagccaccgcacctggcctaaaaattactttgatgctaagtgatgacaataaaaattgtatcatgggccgggctgtgtcttaggcaacaggcaaaaagcaaagacaaaacctctgtggacgaaatcaacctcaactcaacgctcaaaatattctcacaaagtttcaaggaaagagagagcacttcgcaataaaaaaaaaaaacaaaaaacaaaaaaactaacacgtacagggaaatgggaaatcacatgaagaaaaaaaacagcagaaacagaaccaaaaggcttcaaatactaatattaaagagaattattatgtttaataatgcttaaagaagttagaaagtcttgacaccactagtaaataaagtaactacatagtttttttatatatctagtttttagcctttttttttttttttttttttatggagtctcactctgttgccaggctggagtgcagtggtgtgttcttgactcactgcaacctccgcttcctggtttcatgcgattctccttcctcaacatccctagtagctgggattacaggcgcccgccatgacacccagctaatgtttgtgtttttagtagagacggggttttaccatgttggccaggatagtctcaatctcctgaccttgtgatccacctgccttggcctcccaaagtgctgggattacaggcatgagccaccgcacctggccttgagccaatgttttaagtgccatatcacctacttgttcactaagatctcaactatactttcagcacactacataaccttatttccaggaagatgtgtatttgcaaatgtttacttctatttggaacacatgtttttctacccccagaggaatgcattcttgtctggagtgtttcttttcccaagttgatgcacatccacatattcacccattcatatgtgatgtatgtgtatctatgtgtgcatttttttctttttataaaaatagaattgtcctatacatattgatgtgcaacttttccccccagataacaacagataaaggatagttatatagttactatttatagatttacttcatttccttgaatagctgcataatatcccattatgtggatataccataatgtcacattttttttccccctcaagacagagtcttgctctgttgcctaggctggagtacaatggcatgatcttggctcactgcaacctccgcctcctgggctcaaccaatttgcctgcctcagcctcccaagtagctgggactacaggtatgcgccaccacgcctggctaattttttgtatttttagtagagatggggttttcaccatgttgaccaggctggtgtcgaactcctgacctcgtgatccacccgccttggcctcccaaggtgctgggattacaggcgtgagccaccgagcctggcctgtaacagtttttgttaatgcccatttagattgttactgctgttccaggaaatgtgtttctgtatatatcagaattagctacttcttttatttctgtagcagacagtccaaaaagtgagattactcattccaaatgtaggcacattttcatttgactggctagtttgatgcttcctggcagtgtcagagatggtctgttcctagccagcaatgaatattcccatgctatatagtgttgaatttttgtttatctgaggggcaaactttggcaggggtccgttgggatatgctaacaataagataactagtaaatagaagcttttcttaacccaaatgggtagatccgtcgtgattatgttggaatttcaggagttctagaaatgaatgtgcagatggttgcacaatatgaatacaatcaaagatggttaaaatagtaatacatttatgttatgtatgttttaccataattataaataaatgaaaaaatgaatgaatgagtcactcctaaaaattagtaagaaaataaaaccaaataatgaagtagaaaagatgaaacataaaaaggaagcacaaacaggaaatatagtttctttttttttttttttttttttgagacagagtcttgctctgttgcccaggctggagtgcagtggtgtgatcttggctcactgcaacctctgcctcctgggttcaagcgattctccatcctcagcctcatgagtagctgggattacaggtgactgccaccacacccggctaattttttgtgtgtttgttttagtagagatgttgtttcactgtgttgattaggctggtcaccatgttgaccagaccactcctgacctcaagtgatctgcacacctcagcctcccaaagtgctgggatttacaggtgtgagccactgcgcccagcctctttttctttttgagacagggtcttgctctgccacccgggctggaatgcagtggtgcaatcacagctcactgcagccttgaactcctggactcaagcaatcctcctgcctcagcctcccaaagccccggagttacaggtgttagtcactgtgcctggccaaaaagtgaatttttcattttaatttcaattactttacagttaaatctaattagccccatgtagctagcggctactgtatggaacagcacagctttcatgaaccatctgttgaaactggattgcaagaacctttgtgttgtcccttcacataaaaaactaaaaccttaaatgacgactcatgccttacaggtgtagtatgtatacaaaatgaggcagaactcctagcagggtgcccattttcaaacaaaatgctttgccctactatcagagactagtaagtaagcaaataaataaattcagtaacaaaaacaactattaaaaatgggaaaaaattaaaggcaaaacatttacaaaagctcatggattaaaaattgtatcatgaaaattaaaaagttctttttttgttttcttgagacagagtctcactctgtcactcacactgcagtgcagtggtgtgatctcggctcattgctcctcctcctcctcctggattcaatcaattccgtgcctcagtcattcaagtagctgggattacaggcatgcagcaccacaccaggctaatttttttatttttagtacagaggggatttcgccacatttgccaggctggtctcaagtgatccacccatctctgattaaatgctctcatctaaaatcatatggttgtggcatatcagatcttttcactttaaacttttaaattaactaaccagctacgaatacttgtctgaactgagttggatgaggcagctccagtggatcatgcatttctgtcctagactgtcatgagctttaaaaagttaaaaccaggcc[141 bp omitted]gtgtggtggcacatgcctgtaatcccagctactcaggaggctaaggcaggagaatcacttgaaccaggaagtcggaggttgcagtcagccaagatcgtgccacagcactccagcctggcaacagagcaagactccgtctaaaaaaaaaaaaaatattggcccaggaatctcacatctgaaagattaaatatgaaaatgtccatttaaataaagatacatcagagcagtcattttaaatagaagaaacacctgggcacagttgctcatgcctgtaatcccagcagtttgggaaagtgaggcagtgggaggactgcctgagcccaggagttccagaccagcccgtggcacacagggagaacccatctctacaaaaaaaattagaaattgactgggtgtggtggtgtgtgcttgtagtctgagctactcaggaggcagaggtgggaggatcacttgagtcctggaggtcaaggctgcagtgagctgtgattgtgccaccgtactccagcatgggcaacagagagaccctgtcacaaaaacaaaaaaagaagaagcaacactgaaaagctacctatacatttaatattattgaactcatgatatccaggacttgctttagttaagggaaggtgcagaggtcaacaggcatagatcaagtaagattggaaacatggaaactcattgataactactgcagctaggaaatggatttgggggatgtccattacaccatcctttctacttttgtgtatgttcaaagacctccgtaatcaagttaataattaaaaaaaaatttttttgtaatgttctatggataaagggaaatagtcatctatatcctacaattaaaacgctttttaaaatggatagtttgcattacttaaaagcacattttgaaaaacaaaatgccttatcttttctacttcaaaagaaaaatccctcagtctatgctacttacagcccaatttttgtccatgttaacattgtcaccaacttattgaaaatggatcactccttttccttgacacttaagtcttctatatttaacttattgtcctcttttatacacaatcatttcagtgtaccttttcctcctaaaagcaggcatatcctattccttcacatttatatctacagttctttcttctaagcaccatattagaaatctcctggttgagtctactttttagaaagtgatttatacaatgatttagaccctttattaggctgggtgtggtggctcacgccggtaatcctagcactttgggaggccgaggtgggcagattgcctcagctcaggagttcaagaccagcctaggctatgtggcaaaaccctgtctctactaaaaatacaaaaaattagccaggtgtggtggcgcgtgcctgtaatcttagctactccggaggctgtggcacgagaattgcttgaattcaggatgcaggggatgcagtgagccgagatcactccactgcactccagcctgggcaacacaaagagatattgtctcaaaataaataaataaataaaccctttattagactgtaattctgatagcttatatcttccataactgtcacccaccaagaaaagaaggctttatgattttttttttaagtcaataaattttgactaaaagtgaatgaggtcagacgtggtggctcacacctgtaatcctggcactttgggagaccgaggcaggtggatcacctgaggtcaggagttcaggaccagcctggccaacatggtgaaaccctgtctctactgaaaatacaaaaagtagccagttgtggtggtacatgcctgtagtcccagctactcaagaggctgaggcaggagaattacttgaacccgggaagtggaggttgcagtgagccaatattgcaccactgcactccagcctgggtgacagagtaagactctgtttcaaaaaaataaagtgaatgaatatccattgatgcatgaaatgtctgcatcaaaggaaaactagacaagacaacacacaaaaaaagttaaggatcagtatgaaaaataaatatattttgaaaaaaaaattttttaaagcaagaacacaggtttaaatttcaaagggaaagaagtagcttgaagacagaggaaacaggatggctcccgaagaagggaactttattctttgaaatgggaagaaattatgacaagagggtagcacagactgaagaggtggaagtaaaaggggattcttggccaggcgcagtggctcacacctgtaatcccagcactttcagaggccgaggcaggtggatcacttgaggtcaggagttcgaggccagcctagcccacatggtaaaaccccgtctctactgaaaatacaaaaattagctgggcatggtggtggatgcctataatgccagttccttcaaaggctgaggcaggagagtcgcttcaacctggggacggaggttgcaatgagccgagatcatgccactgcactccagcctgggcgacagagcgagactccatctcaaaataaataaataaataaataataaaattttaaaaagtgtgtgtgggggtgtatcgtgacttctcttcatgtgtcttaggccaccacccttacatgggaccttgaagaagagactcctcaaccaatacctgtacggtgctgcctccctgacaggctggcttctaaacagcagtgtcttccccatgtgctcagtccttactcacctcggcaccatcctcccagcacgtcccttgaaaccatccagggctctttcccttgctccagtaaggaaatcacatcaggctttgggatagagagacctgtttataagaaaagaagtaagatagccaggcatggtggctcactcctataatcccagcactttgggagaccaaaacaggtggattgcttgaggtcaggagttcaagaccagcctgaccaacatggtgaaaccctgtctctactaaaaatacaaaaattggctgggcatggtggtgggtgcctgtaatcccagctactcagaaggctgaggcaggagagtcgcttgaacccgagagacggaggttggagtgaaccgagatcatgacattgcactccagcctgggcgacagagtgagactttgtctcaaaaaaaaaaaaaaaaagaaaagaagtgagacatactcctgctgttcctgaattcaaagttagtcccttagtcctcatgaaggactagaggaaggtgtagagttctgaagcatggagaagatggagtgaccccaaagagctgcccatctattaatctacaaaacacaaaacaattccctaggcaacaggtgaaaagtcacccagacaattgaaagctacacccaaaattcatgagttatttgcggatagacatccttacctagtgagaccaggctgctgtagttctccatcattacatctctgtataagtccttctgagcagcgtccaggcactcccattcctcctgagagaagtctatagacagatcctggaacatgaccaacccctgaaatgacaaacccatgcagcgctgttgaaattaaaggaaaggtttttaagatgaaggaagagatggaagggtgctgaaggatggagagaatacagtgagcagaccagctaggatgagagtggggaagagtaaaaaaattagtgtaacttcaacaaagtacctccatgttcatgaatattcctgttgcagccagcaaacctccttcatagaatgggacattccgaatattccatggttagagctgggaatgaataaaacacattgatatattatttcccaaataaatgaactagagtacaaaagcacacagcaagctgtaggcctagcaaagctgaaagaatattacagtaaacatctgatatgcaaattactatttacaacaaaagcttaataaacaggcactcctcccttaccactttctttcttgtttttttttttcctcttgtttcatttttttgtttttgttttcgttttgagacagggtctcgttctgttgcccaggctggagtgcagtggcatgatcacagctcactgcagcctcaacctcccaggctcaggtgatcctctcacctcagcctttgtgttagctgtgactataggcgtgcaccaccatgtccagctaattttttgtatttttagtagaaacgaggttttgccatttggtcaggctgctctcaaactcctgggctcaagcaatctacctgctttggcctcccaaagtgctgggattacaggcatgagccaccacacccagcctttcctcatttcttaaaggaagacaggatctttcaaaaatatctacaaaaagtttaaaaacctctattggctgggcgcggtggctcacacctataatcccaacattttgggaggccaaggcggatggatcacctgaggtcgggagtttgagaccagcctgaccaacatggagagaccattttagtctctactaaaaatacaaaattagctgggggtggtggcgcatgcctgtaatcccagctacttgggaggctgaggcaggagaattgcttgaacctgggaggcagaggttgcggtgagccaagatcgcaccactgcactccagactgggcaataagagcgaaactctgtctcaaaacaaacacaacaacaacaaaaaaaaacctctaatgcacttcactaattagtacttccataaaatagtatagatagcacttcgataattaaatgtacattggctgggtgtggtaacccacacctgtaatcacagcactttgggaggccaaggcagatgaattgcttgagctcaggagttcaagaccaattctgggcaatgtggcaaaaccccatctctacaaaaatatatatcatatacaaattagccagatgtggtgggacatgcctgtagtcccagctacttgggaggctgaggtgggaggattgcttgagcccgggaggtcgaggatgcagtgagctgtgatcctgccactgcactccagcctaggcaccagagcaagatcctgt[131 bp omitted]gaaaccccgtctccactaaaaatacaaaaattagctgggcatggtggcacacgcctatagtcccagctactcgggaggctgaggcagaagaattgcttgaacccagaaggtggaggttgcagtgagccaaggtcatgccactgcattccagcctgtgaaggatcaagactccgtctcaaaaaataaaataaagtaaaataaaatacaaaagtgagtatcatggtatgaataaactgcacacaggtcagacaaaagttacaggggcatctgccagtataagcaagtttcctgtgagacacctggtcatgggtcagacacttgagcattaggctgtgggccaggaaaaataaatgtctggtgaaaggctactgtaaagacccacaagcccctcccctagagccccattagggtgaggctagagtttattatagccattctcctgagagacctcaagacccaattagaagaaaactacaacatttgttacatagaaggcattttccaaagagtaattcaaagatagtcttcctttggatataaaacaaaatctcaagatacgccaaaactgttttgtttttactgaataatttttgtgcatgtgtgttgttgctttagctgcaagtggctaacaagctgtgattttcttttctttcctttccctttttttttttttttttttttgaagcagtctcgctctgtcgcccaggctgaagtgcctgatctcagctcactgcaacctcagcctcctttagctgggattacaggcgcctgccaccatgccgaactaatttttgtatttttagtagagacggggtttcactgtgttgctgaggctggtctcgaactcctggcctcaagtgatccacccaccttggctcccaaagtactgggattacaggcgtgagccaccatgcccgggcaactctgattttctaacttgccccctgtattagggtcatactaggaaaaaaacaagtcagaaccattggagccacgtgtacagatgtgcagtagccctgctagcaacattgctgcttgctttggctcttaggagagatgagttcagcacatgtctgcccttgctctagctgtctctgattcccaacagatgcacaatcatttcactccattagtttcactttggatatcccatcattagattaaaaccagcaggccaaaaagctaacttgaagaaatgctttcacatccacagcattctcatagggtcagtatcatttagacatgacaggaccgtggttgcaggggacagaatgaagtgtcatccttaactggccatccaatgtcatcagcatgaacaggaggactttatatgatattatctgatgttttctgaatattaccttacaaatgctgctttatttataactaaagaatagggaccctgtcttttaaagctttatatttcctcaagtaaatgtttttcgtattaaatccattaataatatctagtggctgacctggaaattccatttctaagtacttatccaaagtaaagatttttttttttttttttttgagatggagttttactcttgttgcccaggctggagtgcagtggtgcgatctcggctcactgcaacctcctcctcctggattcaagcgattctcctgcctcagcctcccgagtagctgggattacaggcatgtgccaccacgcctggctaatttggtatttttagtagagatggggtttctccatg[137 bp omitted]tgttgcccaggctagcgtgcagtgaggtgatcacagctcactgcaacctctgcctcctgggttcaagtgactcttgtgcctcagccatcaaagtagctaggaatacaggcacacaccaccacacctggctattttttttggtatttttggtagagaccgggtttcaccatgttggccaggctggtctcaaactcctggcctcaagcaatccacccaactcggcctcccaaagtgctgggattacaggcatgagccactgagccaggccagagaattttaaaagtatgaagttgtatgcagaagaatgttccttgaagacaaaaccaaaaaatctgaaacaaatgtcttgttggtagatatataatacaatactttttaatgggaaagatatgcaatattgagggagacagggaaaagagaaagcagaaaaaagaagagagaaaatgaaaattactattaggacttaaagctatttctccccagtctgttttccatacacagaacaatacagatgtgaccgcagtacacatataattttgtattctcctttacactttgattttttcttatcaaaaacactttatacatggcatttaaatggcttataactttcctaaatggctactacactgtgtacttaaccattctgtttccttctacttatgatttttgctgcaaacctttcccctccgatctgtccacatttaaattcctttaaggaagggggctgtatagaaattttaatttatgtgcattttactgaagcctacctttttctttatggtttcttttcttatttctaaacgctaatctatttgaatgtggtcaaccattccttaaaatgaacacaaacaggaaaaaattggggaactgtgtccttcaaaatataagtattttggccatgtgtggtggctcatgcctgtagtcccagcactttgggaggccaagacgggtagatcatttgaggtcaggagttcgagactagcctgaccaacatagtgaaacctggtctctacttaaaatacgaaaaaggccaggcgcagtggctcaagcctgtaatcccagcactttgggaggccaaggtgggtggatcaccagaggtcaggagttcgagaccagcatggccaacatggtgaaaccctgtctcaaattaaaatacaaaaagtagccaggcgtggtggcaggtgcctgtaatcccagctactcgggaggcagaggcaggagaatcgcttaagcatgggaggcagaggttacagtgagccaagaccgtggcactgcactgcagcctgggcaacagagcgagactcagtatcaaaatataaataaataaataaatataaaaatacaaaaaagtcgggcacagtggctcatgcctgcaatcccagcactttgggaggctgaggcgggcagatgacttgaggtcaggagttccagaccagcctggccaacatggcaaaaccctgtctctagtaaaaatacaaaaattagccgggtttggtggctcacacctgtaatcccagctactcgggaggctgaggcaggagaatcgcttgaacccaggaggcagaggttgcagtgagcagagattgtgccattgcactccagcctgggcaacacgagtgaaactctatctcaaaaaaaaaagaatacaaaaaattagcaggctgaggtggcgcatgcctgtaatctaggctactcgggaggctgaggcaggagaatcgcttgaacctgaaaggtgaagattacagtgagctgagatcacaccactgcactccagcctgggtgacaagagcgagaatctgtctcaaaaagaaaaaagaaaataaaaaagaacttttatttgggggaaaaaaaaaagaactccaaaaaaacaaaaatggagtgaaagggatttaaggaaattgaaagtcaacaggctaataatgccaataaataatgatggagcaaagaaatccatgttggccaaataacaccaacgtgtttttaaatagtttttcaaaatttagacagttttccagtacactgagacacttctgctatcaagactataatagtggctgagcacagtggcttacgcctataatcccagcactttgggatgccaaggcaggaggatggcttgagcccagaagttcaagtcaagcctgggaaatatagggagacccccgtctctgcaaaaataaaataaaataaaataataagccaggcatggtggtgtacatctgtgaactgtgaccaccccactgcactctagcctgggtgacagagcaagaccctgtctcaaaaaaaaaaaaaactataatatagagtaaatgacattcaggtaagtggaatattaggtgttcaataaacgtaggttattccctccctatctccataaaatcatcaatttttttaaaagagaaattttgattagaatctttaaaaatatcaatacttctctttccaaaaaaggagggaagatttaaatataacaatttctcaagtatttctatttattttcattgttgcttaatattactcataataatgaaaatgcaattgctctctttcaaacatagttttaattagttgtacaaaatgccaccttatagtctgatgtacttcaaatttccctatctatgaaagctaaatttggatattttcatctcaagtatattgtaatctctgtctttaaatctatctagggttctaccttttctgtcatccttagtgaatctcactatagtcctccttccctttaaaaatgcagtgataggccaggtgtggtggctcttccctgtaatcccagcactttgggaggctcaggttggaagattgctggagctcaggagttcgagaccagactgggcaacatggcaaaaccctgtctgtgcaaacaatacaaatattagcccagcatggtgccatatgcctgtaacccagctccttgggaggctgaagtgggaggatcccttcagccctggaggtcaaggctgcagtatgccatgatcctgccactgcactccagtctgggtaacagagtgagaccctgtctttaaaaaaaaaaaaaaaaggccgggtgtggtggctcacacctgtaatcccagcactttgggaggcagaggtgggtgaatcacttgagatcaggagttcatgaccagcctggccaacatggtgaaaccctgtctctactacaaatacaaaaattggttgggtgtggttgcgggcacctgtaatcccagctactcaggaggctgagacaggaagactcacttgaacccggcaggcggaggctgcagtgagctgagattgtgccactgcagtccagcctgggcaaggcagagtaagactgtctcaaaaaaaaaaaaaaaaaagaaagaaagaaagaaagaaagaaagaaaaagaaaatcagtgataggtgaggcagctcaggcctgtaatcctagcactttggaggcagaggtaggaggatcacttgaactcaggagttcaagaccagcctaggcaacctagtgagtctttcctagtgaaaattatttgtaattatgccagagtgctggtgtgtgcctctggtttcagcttacttggtaggctgaggtaggaggatcacttgagcacaggaaatcaaggctgcaatgagccgagatcgtgccactgcactccagcctgggagacagagtgagaccctacctcaaaaataaaaataaataaataaataaaaattcagcgatggagttgatggattcgaggttgagaacccccaatgtgaacccatttggaaaaaactcaaactatgttcttcctctgcttcacaacaaaaccacaacaatcaaaccagaagacttctgtggcctcaaaatccaaggagatttctccccatcagcaagcaaggaatcagttctgcagcagacaccagctgggtgtccaccaattcgattctgacactatctaccatgagatactgtcatcccacaggctaagggctcagcccccaaaactggtcccctttcagacaccagtcacaagtcccagcctctacaacttctgactgacgggttcaatttgggattcctacgaccccctctttgggttcgattaatttgctaaaataaaatggctcacagacctcagggaaacacatttactggctgattataaggatattccaaaggatacagatgaagagatgcctagggcgaggtatggggcaaggggcacagagcctccatgccctccctaggcacgaccctccaggaaccaccatgtgttcagctctctggaagctctctgaatccaccccttttgggtttgtaaggaggcttcattacataggcatgattgattaaaccactggctacttgccatcaacttaatcctcagtcccctccactccccaggggtgggagggtaggggctcaaagtctcaaccctctaatcctgccttggtctttctgatgaccagcccccatcctgaagctttcggtcaatcactaacatacaaaaagccaaaggctgggtgcagtggctcacgccggtaatcccaacactttgggaggccgaggcaggcagatcacctgaggtcaggagttcgcgaccagactggccagtatggtgaaaccccgtctctactaaaaaaaacaaatacaaaaattagccgggcgtggtggcgcgtgcctgtagttccagctactcgggaggctgcggcagaagaactgcttgaacccgggaggcagaggttgcagtgactggagattgcgccactgcacttcagtctgggcgacagagagagactccatcaaaaaaaaaaaaaaaaaaaaaaaaaaaaaaaaaaagccagcacttaagagattccaaggactttaggagttgtatgcgaggaaatagggacaaagaccaaatctgtatttgagaaaatcacagaaccgtatgagtatttaattcaatacagacatggaaactggcccaagcatttactcacagatgactgggcaaatccctggtgttattggtacaaactattgatcgagcccccaatctcattcctacccctaaaatatagcaaagtgaaagatcttatcacttatttggactgagattaacaccatcccataaactgcatggctttcaatcccagggctatggcgtgtgatgccacatagaatatgcactaatctctgcagcaattgagttgttagggtaaaggctcttgtttttgccttctttctctcacggccaagaaaattaaggaacagggacacaaaggatgaggtcggagcggaagtttaataagcaaaagaagaaagctctccccagcggagggacccaaaagagggttgccaactaggaggctgaatctgggggggtttattaactgggaaggggaggaacgtgggctgtcttgaagaaagcactacccagcttggccctgggaccttagcccgggaccaatcccaggctgaagtgaaagtttggcccaggaccaatcaggggctgaagtgaaagtttggcccgggaccaatcaggggctgaagtgaaagtttggcccgggaccaatcaggagctgaagtgaaagtttggcccgggaccaattaggggctgaagtgaaagtttggcccgggaccaatcaggagctgaagtgaaagtttgggccgggaccaatcaggagctgaagtgaaagtttggcccgggaccaatcaggggctgaagtgaaagcttggcccgggaccaatgagggggtgaagttatgattcaaagaggccgcgctcacagtctaaagcatgtccaaaaaaggaaagtggccgccggaacctgttagtccaagctgcaccgtttcgtaagcccccaccatttcacagaccctggtcagagggaaacattccacccgggtttgggctgtgcgaaacatccttcccaaccgcctgacttccttatcacatcctgctgggcaaaagcccaagaaacatccttatcaactttctcccaggcaacaagccataccgcccagacccctcctgcccaggcctgtaattaccccagcctggaagcggcagtgggctctggcatttagttggtccccgccatagagccgccaactctctctctttctttaaccctcgccttcccttcaaaatctaacagagcccaccgtgtacatgcccacaaaagaagcgactatttcgtggaagcccgctggtcacacaaaggacaaaggcgtttctatgttgggcctcggtcccttatcagtgcagctgaggaatgtcttcaggacaacccccctgtggagttttccttatgtatgcctgcagcctgatttttcaggctgtttctctgtttaaaggacttttaccaaggtcccaccctaactgcctaaagagttttttctctcaaggggacacacaaagtcccaatcgcacacatgcctccgcatatccacttacccactgcctcacagccaatcacactctcctctctcacatacaccaaggggccacacaagttgcacttgcacagccacagacctgcaactcacgcacacaaggtactgcacagacacgcaaagtcacacacccaccccgggacacgcagtccaaccacacagtcaccggttcttcacatccgcacgcacaacgagggtcgtccaggacacacacacccactccgggcgcgcacagtcacaagcgcccacctgatcacccagagtcagcaccacacagccacagtcacagaccacggagacccacggcagccatcgcgatcacacacgcaaactcctctcctcagccctccacacacaaaaggaccggagccggattcctcaccctcagcattctctggttccgctcggggccagcctagccaagttcctcaggactccaaggcgcggcggcagctaaatcggcacagcaaacggtcccgccacctggctaagaggaagccaaaatctcgcgagacgtggcgtcggcctgcgggatcctctgggaaatgtagtccagagcccgactgcgggcttccctatgcctctcatttccaagcctggcttgtttccttttaccgctcctctccaacgaggatcgcagagccctcatgccgagcggctcgctatggggccggctcgcccgctagagtggtcaggcctgattatccctggcagctctgttatctggggtaagacacaggaaaacgtgcttccggttctcggcggaagtagccccgaacggtagaaccgatgggaaatgtagtccagggcagaaaagcggtcaacccagccacgatgcgagccaaaggattcttggctccaagcctggtcctggctgttagtttggaactcatgcacccagatgctaactcgccctcagaatgcagaggggatgaaacactgaccggacaattcaatctgtatatgggtgagtccagggctcagtctgcattgcgcggaaaatgaaggtgaaggtggaggtgggacctgatggtctcgtcccggatagggttgaagaagtgggagaaaaggaatcaaaatcgtggatgggataagattgtgcgcgaatgctctctgggagcggatcgtggccgacgagggcccgaagatgctgccttgtgatcgcaggtgtgagtggaagctgtgtgagtgtcaatgtgagttgcctgtttgggagaccagcattgtatttttgtatcaggtagtaaccttggagccaggtatttgtaaaattatgataagagggcatcattctggagcatcgattttatttggaggttgacaggagagggaaaaaaacccctaatatctgataaacaacataaatagatttttatgttaaagtagttatatttattacggtctagaatgcaaatccaacatggcttttaaagcaagaaagattttttttatacaaagtcaaaggtattatttttatacacttactacaaaacatacaaatagtataccaagcctaagaatataaagagtctagctttaattaattgaatgtaaatttaaaaacaagcatctaataagtagtccttttcacacatcgaaaagccaatttcggaatttttttaaaaactcaaattacaaagtaacaaatatctggtgtcttagtaacttgaagatcagtactaatgattaagccagcttatatgctaatatgatacatgaaaaagcctgtatttcacaaatagcaaaccactaaaactttaattttccacagaagccattgtttcacaccaataattatgttaaagatcaagacaggctaaaagtttttaatgagcactgaatccattaaaacttggcaaatttttccacgaaggtagaattttaatttctgtttaaaccatgggtagatggtacacccttgtgagggtgtactgtaagtacttctaaggagctttatcagacttcatcccaaattatgtacctagtaaaagatgtaccaatgtctactttggaataagaaattattccttgtttgagcaaggattaagcagaaactgaaagaagtgtagtttatagcttcttacataaagtagatgggcacccctcaaaaacaaaccaatatcctggctccttaaatatcaacattaatctaaataatgtatagcatgctcctgtccaatctttcccgctcatttgtagtcttctcagatcgatgcttcattttagtcacacatttctatcctgcaagactgggtacctgggctttttgtctggttttgtaacactaggcagttttggccttactcaaaatataagactgcaaaaggcctgttttacctcaaccatacggcttcaggaaatggtctgtatttccaacagaaaagtggtatctaactctcaggatggtttctaacaactggatagatacctgggtctttgcggcctgtgatgcagcctaacaatacaggaccttgtgtgatcagctaggtctgctaaagcaaggggacatccatgttctagatttttatttatttatttttttttgagacggagtcttgctctgtcgcccaggctggagtgcagtggcgtgatctcggctcactgcaaactccgcctcccgggttcaagccattctcctgcctcagcctcctgagtagctgggactacaggcgcccgccaccacgcccggctaattttttgtatttttcgtagagacggggtttcaccg[137 bp omitted]ctgcctgtcctgaagagactctctttctcttccatacaacggctggcctctaccaagttaactgcttcgtggggggaaaatattgcctttcctttggtctgcatgttttaagggaaataccaaatacacctacaggagtttatcaataatagacaaggctgatttcaaactctttcaggagataaactggaggggaagacgaatggcaggagggtgaagaggaaactgaattactgtgcaaacacccgccactcaaatccgggtggttactgcagagtgaataacgataggtactatttcgtgtaaggcaaagtcctttgaaagggctcctagagcgtcaaggcctccacctgatgaatgaatgagtcaggcaggcccagctccacttcacggatgggaaaactgaggtacgaggcctcgctgaaagatgcgaggcagagcggagaaccagaagcaccacttctctcaggctgatgctctaatctcggctccccccgcccctacaatggcgtagacggcctccgccgcccgactcacacacaccctcccccgggaacggcaagtctcctcgggttccaaggacagggtcaaaagacaagaggcccgaggcgctcccgccgtgatttgcagccagataccgttgggagcgcagccagagagcgttgggagcgtgcgtacctccagcccaacatggcggcggcagcggccgcccccgaccccaagccctccctcagggcccgaggcttctcctcagggccttccggtgggcgggaagacagcgcaaccccgccaggcctttctcgtcgctgcgcctgctcgctgaaggagtcacctacccgacgagactaacggctgcggcgcggaagccccacagcccgccgagaaccaggaatacgagagccaggcggcgcggcggcgggacctgtactgagcaagaaagaagatttcaaagtaatttattgttatgagatccgtgcttttatcttgtctcagactcccaatgataggcacatactctcctctgtacatttaatgaaactactaaaatatttcgatttaaatcttccacctatttgttttctgtgtatcctacctgttcccgaccttgacattttcaaagaatacaggttacttattttgttttttggtggtggtgagtttttttggggttttgttttttggtttttggttttatttttggagacagggctttgctgtatcgcccaggctggaatacagtggcgcgatgatagctcactgcagcctcgaactcctgggctcaagggaccctcctgcttcagcctcccgagtagctgggactacaggcctgcgccaccacgcccgggtaattttttattttttgtagagatggggtgttctatgttgcccagtgtggtctcaaactcttgggctcaagagatcctcccacttctgctgcccaaagtgctaggattacaggcatgagccaccgcgccgggacagttattttgtagagtgttctttaatttggatgtacctcatcttttatgtatctttgggaggaataccacataactcatgtggtttatcccatcgagagacacacagtgtcaatgtgttccattcttggtgatgttaacttttattacttagtgaaaataattctaagagatttcaccactgtagagtgaataaatgaatatgtgggattcatcaatgaataagtaaaaggatgccaactggcaaaagaactgagttgggaggatggcttgagcctgggaggtcgaggctgcagtgagccgtgatggcaccactgccctccagcctgggtgacaaagcaagaccccgtctcagaaaaaattaaataaataaataaatacccagcacctgaacatctcgggcatttcctgtgcctcttatattgggtccctggtttcttggagcgtatgtcttttttttttttttcttggtttagcttctcatttttgtaaaaaacacgttcttattttgtttaccattttgacaaaggcgaatttgggttaaaactttgggacccttataagcttgacagtgtctgtattctacctcttttggatgacaccttaactaggtttgaaattttaggttgaatgtggttttcacttagaattttgaattatataacattgtctgctagcttacagtgtttatcttaaaatatgacaatttgatttgtgttctgttactgttctttgtctttcaaagcatttaaaggccaggctcagtgattcatgcctgtaatcccagagttttgggagtacgaggcaggaggattgcctgagctcaggagttcaaaaccagcctggatgacataaggagaccctgttttcataaaagtaaaaataggccgggtgtggtggctcacacctgtaatcccagcactttgggaggtcgaggtgggcagatcacctgaagtcaagagtttgagaccagcctggccaacatggtgaaacgctgtctctactaaaaacacaaaatattagttgggtgaggtggcatgcacctgtagtcccaggtactcaggaggctgaggcaggagaattgcttgaacccaagagggcatggttgcagttgagccaagatcgcgacactggactccagcctgggcaatggagtgagaccctgtctcaataataataataataataattttaaaaaacatttaaaattgtctcttcgtactagttttctgaaatttcacagaaatgtgttttggtgtggttcttgtttctttcgttgtacaaggtactcagtggatctttgtattaatattttgaagactcatgatctgtgtttctagaaatcgccttttgtttgttctgtgaagttttcttccattcatttttcttctctctttctgaaattctaaacatccttttagttggatgttataatttctgatttcttctggtagttttgtcatctttcatcccttttatttttatttatttttattttttgagatggagtctcgttctgtcgccagactggagtactgcggcgcgatttcggctcactgcaacctccgactccctggttcaagcaattctcctgccttagcctcctgagtagctgggattacagacacctgccaccacacctggctaatttttgtatttttaatagagacggagtttc[141 bp omitted]cagcatacttgttggagtcaaacatttgttactatccaattattattattgttatttgagatggccttttgctctatcgcccaggctggagtgcagtgctgcactcctagctcactgcagcctcaacctcctgggctcaggtgatcctcccacctcagcctctcaagtagctaggaccacaggtatgtgccaccacacccagctaatttttttattttttatagagacggggtttgaccgtctccaggctggtgtcgaactcctaggctcaagcaatctgactgcatcagcctcccaaagtgctgggattacaggtgtgagccactgtgcccagcccaactatcatcatctttatttttattattattattttttgagacagagtctcactctgtcacccaggctggagtgcgatggtataatctcagctcactgcaacctccgcccccgcccggttcaagcgattctcctgactcagcctcccaagtagctggggttacaggtgcttgccaccgcgcccagctaatttttgtatttttagtagagatggggtttcacaatcttggccaggctggtgttgaactcctgaccttgtgatctatccgcctcggcttcccaacgtgctgggattacaggtctgagccaccgcgcctggccactatcttattattaaataatgttacatgcagtgtctttggggagagaattcagtttttcagagacagactttgctcatttcctgatttgttcattttaattcaaatagtaaaagctttagaaaggcatgaggattgcttgactccaagagttcaagaccagcctgggtaacaaagcaagaccccatctctacaaaaaacactttttaaattagccaggccttgtggtatgtacctgtagtctcggctactgggaaaggtgagttgcgaggatctcttggggccaggagttgaaggctgcagtgagctatgattgcaccacttcgctccatcctatgcaacagagcaagactctgcctcggtcaatcaatcagtaaagatacttatcaaaagtaagcagacatgcaggcagatcacctgaggtcaggagttcgagaccatcctgtccagcatagtgaaaccctatctctactaaaaatacaaaaattagccgggtgtggtggtgggcgcctgtaatctcagctgctcgggaggctggggcaggagaaccacttgaacctgggagacggaggttgcagtgagctgagatcgcaccattgcactccagcctgggtgacagagcaaaactccgtctcacaaaaaaaagtaagcagacatgtctgctgcctacgtgaggtttacattctagtctgggagaaaaaaaagattttaaagtaaaaggagaaaatgaggtaattttatatcgtgatcaatactatgaaataaatcaataggtggtataagcagtaacttgagggatacttcccgtagcattgataggacaggtgactgagagataacccttgagctttggtggtgaggagtcagcagtgtggaagggtattccaagcagaggcacagttacactaaagatgctgaaaaatcagagagcacttggagcattccagaaacagaaagcagcctggtgtgactgaagcttagcaagtgagtgggaaattagtttagatttaggatgcagaggtcagcattttccatatcatgtgaggaaatgatagtgctgagattacaggcatgagccactgcacccagccccaaaccaagtttttacagtggtaagaatagatgttctgctatggtcagtgtctaaagattttacaaacaatatctcttctagtttgcagtcattattgaaataacaaacacgttctattgtcaggccttactatcactaactagtttcattgatctgaataggaaacttacttgattaatcagctactctggtattacctgacatctcattaatgcatctatgaattgaattgttgctcaataggagtgattgttaaatagtggcaatgtgatatatcactattgaagttatggcctctaatgtgggtcctatgacagtttcggcaactctgtaagcactacggggttttacaatgatttctgcaattttttttttgttttttttttttgagatggagtctcactctgtcagccaggctgcagtgcagtggcacgatctcagctcactgcaacctccgtctccctggctcaagcgattctccttgcctcagcctcctgagtagctgggattacaggtgtgtgccaccacgcctggctaatttttgtatttttagtagagacggggtttcaccatgttggccaggctggtctcgaactcccgacctcaggtgatccacctgcctcggcctcccaaagtgctgggattacaggtgtgagccaccgcgcctggctgatttatgcaattttataaggcaataatttcatcataatttgtttgcttatcctttttttttgttttttgagaccgaatgtcactctatcgtccaggctggagtgtggtgctgcaatctcagctcactgcaacctctgcctctcaggttcaagtgagtctcttgcctcagcctcccgagtacctggaattacaggtgcacacaccatgcccggctagtttttgtgtttttagtagagacaaggtttcaccatattgcccaggctggtctccaactcctgggctcaagggatccacccgcctcagcctcccaaactgttgggattacaggtgtgggccacctcacctggtcgcttgtccttcttaaataaggaagtaacagtgttacagttcaaaattctattttaaactttttaaatattctgcttctcgactttatcaggatgtttcttttttcgatgatccacaaatcttgatggtttcatagccctgtttgtaaaaaaacaaaacaaaacaaaaacaaaaaaaatgattattcataagaaacaagctgttttgagttaaatggggttttcaataaaaccgtaagctaggtcgggcgtggtggctcacgcctgtaatcctaacactttgggaggccgaggtgtgtggattgcctgaactcaggagtgacacagagtgagactccgtctcaaaaaacaaaaacaaacaaaacaaaacccgtaagccagatattcattcattcagatgtagtcaacatttttcattttcaacacttaacacaattaatgctaggttgaattattttcataatataactattttacataattcccaaagcactgaggatcaatcataaatactatccacaaggcagccaatagacacacacagaccacctctcatgtaactttgggatagagcattcaatcaagaaaaagtcttccgattatagccatcaatttgccatcattttgtagcactgatcttgcatagatttttttttttttttaagatggaggctccttctgtcgcccaggatgaagtgcagtggcatgatcagctcgctgcaacctctgcctcttgggttcaagcgattctcctgcttcagcctcccatgtagctgggattacaggcacgtgccaccacttccaggtaatttttttgtatttttagttgacacgaggttttaccatgttggacaggctggtcttgaactcctgccttcggtgatctgccttcctcggcctcccaaagtgctgggattacaggtgtgagccactgtgcatggcctgatcttgcgtggactttttatcttccataaaatgttcaatgctgcccataagacttgagagaaattaaataccaaggagtaaaattctgtgcaataggccaggtgcctggtggctcacacctgcaatcccagcactttgggaggccgaggcaggcggatcacttgaggtcaggagttctagaccaatctggccaacatgctgaaactccgtctctactaaaaatacaaaaattagccgaacttggtagtgcatgtctataatcccagctacttgggaggctgaggcaggagaatctcttgaacccaggaggcagaggttgcagtgagccaagattgcaccaccgcactccagcctgggtgacggagtgagcctccaactcaaaaaaaaaaaaaaaaaaaaattgtggaaggccacaaaccattgcaacaactataattcattttaccttcagtaaccaatgttcaccctcttaggggcaatatcacacccattaagaatgcttggccaggcacagaggctcatgcctgtaattccagcactttgggaggccaagggggggcagatccactgaggtcaggagttccagaccagcctggccaacgtggtgaaaccccgtctctactaaaaatacaaaaattagctaggcatggtggcaggcacctatcgtcccaactactcaggaggctgaggcaggagaatcacttgaacctgggaagtggaggttgcatttgagctgagattatgccactgcactctagcctacatgacagagtgagaccctgtctcaaaaaaaaaaaaaaaacttacagtaaggctaaataaatatacaaattaggtgtgtgtgttagtatacatacatttcctagttctgcccactaagagggcctagaagcaatgacacaccagtagcaatgagcacacttgtcaccctgatcttggtgattttgtttttgttttgtttttaaaaatagagatggggtctcactgtgttgcccaagctggtctcaaactcttggcctcaagggatcctcctgcctcagcctcccaaaatgttgagattacaggcctgagccacctcacccagcccaagattttggtgctttgtaaataaaactcttcaataaaagaaaccaaggatctttaaatgaatggtttattccacgtctgggtcagggaaaatatcaaatgaatcaaaacattttatggtgccagaaagttgggaattagtcccgtaccccagccccctgataaaggcatgctataaatggaatacaggagccaacctaaagaaactcccaaggccagtgttctttttttttttttttttaagatggagtttcactcttgtcgcccaggctggagtgcggtgatgtgaggtgtgatcttggctcactacaacatccgcctcccaggttgaagcgattctcctgcctcagcctcccgagtaggtgggattacaggtgcccaccaccacactcaactaattttttgtacttttagtagagacagggtttcaccatgttgggcaggccggtctcaaacttgtgacctcaggtgatcgccaagcctcggcctcccaaagtgctgggattacaggtgtcagccactgcgcccggcctactttcttattgttttcagtatcataaccatgtacatgttcaattgcgcatatactatgttctctacaaaggtgcagtttggacctgactcatctctatctccagctcctaggaacataggaggtactcagttacatgcttgaaaactgctggggaacagaaatataagtctaaggaccatgagtaacattcattttcatctaccacaaacagatatacaactcatctgagccttggtttgattcattcattcatatgttcattctttaatttgtgaagtacttataaatgtcaatacacacttgataatgtagtggatgctggaaattcaggagtatccattcaacttccttacgagatctatggaataaagtatgtactatgctcaaggtgagcacatggttctagaaaaagccagaggaaaagtagctcatttctggaaaaggtgatatctgagctgaaaaaatgttttcacgtagaagtgaacaaggttactaaaataagtactactcaggagtatgataatgagcacggacgtctgagtagaatagaggtaaaggtcactgggattaataaagcaaggtgtggccaaggcgagcggattacctgaggtcaggagttcgagaccagcctgaccaacatggagaaatcccgtctctactaaaaatacaaaattagcccggtgtggtggtgcatgcctgtaatcccagctacttgggaagctgacgcaggagaatcgcttgaacccaggaggtggaggttgcagtgagctgagatcacaccattgcactccagtctgggcaacaggagcagaactccgtctcaaaaaaaataaaataaaataaataataaagcaaggcacacggcctgatcttgcctagattttttatcttccatgaaatgattaatgctgctcataagacttgagagaaattaaataccaaagagtaaaattttatgcaattggtcaggcacggtgcctcacacctgtaatcacagcactttgggaggctgaggtgggcagatcactggaggtcaggagttctagaccagcctggccaacatggtgaaaccctatctctactaaaaatacaaaaattagctgtggtggctttcctctagaagagctgggtgcagtggctcatgcctgtaatcccagcactttgggaggccaaggcaggtgaatcacttgagcccaggagtttgagaccagcctgggcaacctagagagacctgtctccacaaaattattggggcatggtggcacatgcctgtggtcccagctacttgtgagtttcaggtgggagggtcacttggacccaggaggtcaaggctgcagtgagctgtgatcacgcaactgcacttcagttcggatgatggaggtgagaccctgcctcaaaaatataaagtattggtactctacaacaagagcattgcattgtcacccatgtagacaataaattgactcagaatcacaaatacttatattggggacctgtatgtcaagccctaggaagagtgccaggtcatcatctgggaaaggaaatattaggagtattggggtgtgaatagtactgcacagaattccaattcatttcaaaatatatttcacagattatcacaaaccaggaaatgagttgtgtgtaattttctttgtttttgagacagaattttactcttcttgtccaggctggagtgcaatggctcgatctcggctcacctcaacctccacctccccgaaacctctgcctcccaggttcaagtgattctcttgcctcagcctcccgagtagctgagattataggcatgtgccaccacacctggctaattttgtatttttagtagagacggggattc[143 bp omitted]agtgcagtggcatgatcccggctcacttcaacctccgcctcccgggttcaagcgattcttgtgcctcagcctcctgagtagctgggaccacaggcatgggccatgacactcagctaatttttgtattttcagtagacacaaagtttcaccatgttggccaggctggtctcaaactctgggcctcaagtgatctgcctgccttgacttcccaaagtgttgggtacaggcatgagacacggcacccagccagttgtatgtagttttaatcaaacaactccccaaattcaatgaagacaccaattgtattcatatcctgccctactagtcacccaagtgaatatcatcatccaataatgaaatacctctaaaacaaccacatgctggagggctgggggttaaaggaaggaaatatatgatttttactatttgctttttttttttttttttttttgagatggtcttgctctgtcgcccaggctggagtgcagtggtacaatcatggcactgcagcctcgacctccccgggctcagatgatcctccctccccagcttccaaagtagctgggattgcatgcgcacaccaccatgcctggctaatttttgtatttctttgtagaggccacgttctgccatgttgcctgggttggtttcaaactcctgggctgaaatgatccacctgtcccaaccttgtgaagcgctaggattacaggtgtgagccaccaggcctggcctgttttattgtttaatactttaacatttgaggcttccaattgcaagcaacagtctcagcctttggtaattaagccaaaaaggtaggtagctcacagaatgattgggagggatagaaatccaggctccaggctaggcttctaggtgctatgcccaaaattatgccatgggacaggtatagtgagtaagtcacctgcctctcctgctggcacaagaacaatgggaattgccactgttgccacgctgatgtgctgtctgcacctgatacacgatatatgagcaactactcttgcctgtgaaagccggaacctctgcctccacccttgcacgcaagatgaattcatgtgaaaccttaagttgatcaattttgaaatatcttgatatgagtttcattggtgaaacttagacacatgacttagtcacgtgccctacttcaaaagagcccaaggaactgaagaaatttcctagagctggcaaaaatgttcaaaagggacagggagtggtggctcatgcctatgttcccaacattttgagaggatgaggtaggaggatcgcttgagcccaggagtctgaggctgcagtgagctgtgacagcaccactgcactcaagcctggacaatggagtgagcccttgtctcaaaaaaattttaaaaatgttcaaaaggtactgagtggccagaaaaacagaacaaatgcctcctatcttctatcttttgacatctcttcagtaacatacacctttcttccataatcaaatttaacatcttcatctacaacaaaatggtcttgccccatatactgccactacctcactaacgtaaatgcaaagttcctccaagtgtcataagttactgtgaccattttctttcttttctttttgacatggagtctcgctctgtcgcctaggctggagtgcagtggcgcaatcctggcttactgcaacctctgcctcccgggttcaagcaattctcctgccttagcctcctgaatagctgggattacaggtgtgcgccaccatgcccagctaatttttgtatttttagtagagacagggtttcaccatgttggtcaagctggtctcgaactcctgaccttgtgatccacccgcctcggcctcccagcttttagtttaattaggtatcacttgtctatttttgtttttgctgcaattgcttttttggaaacttagccaaaaattccttaccaagtccaatgttgagaagagtatttcctaggttgtcttcctggatttttatagtttgaggtcttatatttaaatctttaatccattttgagttaatttttgtatatggtgaaaggtagggggctcagactcaatcttctgcacatggctggccagttatcccagaatcatttattgaatagggagtcatttccccattgctcgttttttttgactttgtcgaagatcagatggttgtaggtgtgtggctttatttctgggttctctaacctgttccattagtctatgtgtctgtttttgtaccagtactataacattttggttactgtagcctagcagtatagtttgaagttgcatatatgatgcccatcagcagtggactggataaagaaaatgtggtacatatacaccatggaatactacatagccttagaaaacagacaaacaaaccaaaaaacccaaaaaacctgtcctttgcagccacatggatgcagctgaagtccattatccgaaatgaattaatgcagcatcagaaaaccaaatacctcatgttctcacttataagtgggagctaaacattgagtacacatggacacagagatgggaacaacagacactggggcctgcttgagtgggaagggtggcatgaggctatgggtcaaaaaactgttgggtactgtggtcactacctgggtgacgatatcatttgtacaccaaaccccagtgacatgcaatttacccatgtaacaagctgcacatatcccttaaacctaaaaatagaaaaaactaacaataaataaatgaggtatgtctaattgttgaatgctatgaaaggtaaccaatggagatattgaacatcgtgagagtggcctggcgctgtggctcacacctgtaatcccagcactttgggaggctgaggtgggcggatcacgaggtcaggagttcgagaccagcatggccaagatggtgaaccctcgtctctactaaaaatacaaaaattagccggttgtggtggtacgtgcctgtaatcccagttactcaggaggctgaggcaggagaatcacttgaacccaggaggcggaggttgcaatgagccgagatggcaccactgcactctagcctgggtgacagagcaagagtatgtctcaaaaaacaaaacaaaaaaaaggaaaatagtgagagcaccatatctggaaagtggtccaggcactggggtgaggggtgagtgtcagccaagtcatcagctatcagaacaggaagtcatcaggtaatacatcaagtggatatattgagaaggagcaggatctacctattatataacacagagataaccactcagatatatagattagaaatagtttagaaaatttaaacatctgattattcagggagtagacctgggagcattggagaaatgatggggagtagactgcatggaaagctctttcttagtatgtgatttttcaattatgcacataggtttcttacataacatgtaaaattcaattaaagaagaaacaaagttgtgttctggggtcccaaaggttcagtgattaattagaagaactcacaaaactgagtcaagctgttattctcatggttatggtttattacaacaaaaagatgcagattaaagtcagcagcagcaaaaggtgcgtagggcagagaccaggagagaccaagcgcaagcttccagttgccctctcccagcggcatcatgtgtacagtgcttaattcacccagcgatacatggcagaaagtacagaaaatactccccagcaaaaagcttacctgagccttggtgttgagggttttactggaggttggtcacatggacaagagcacccatttggatgaccttagtttctctgtctccacccttcccaaggtcaagctgacactgcatggtccagggtccccacaataaatcacattgttaactcctacagaggcaggatattccaaggacttagaggttatttcctgggagatggactagagtcaaacctttctttggagtgtgcggggtttggacaattcaggcctacttagtttccttgactgcacacaagtgatagtgagtatgtaggaaatgaatagtctcatatattgctggtgaaagtatagtgttgtataaacctctggaaagaaatcgagtgtgtagtgcataaacattatatttggtttgtttttgttcttgtctgagacagagtctcactctgtcacccacgctggagtgcagtggtatgatcacaactcactgcagcctcaacctcctgggctccagctatcctcccacctcagtctcctgagtagctgggaccacaggcacgtgccaccacacccagctaatttttgtgtttttggtacaggcagggtttcaccatgttgcccaggctggtttcaaactcctgggttcaaacaatcctctacctcagctccccaaagtgctaggaatacaggagtgagccactgcacccaacctatatttgtatatacattaaattgtatatgctaagccgggcacggtggcttactcctgtaattccagcactttgggaggccaaggtgagtggatcacttaaggtcaggagttcgcgaccagcctggccaacatggtgaaaacccatctccactaaaaagacaaagttagctggacatggtggcagatgcctgtattcccagctacttgggaggctgaggcaggagaatcacttgaacccaagaggtggaggttgcagtgagccgagatgacaccactgcactccagcctgggtgacagactgaaattccatctcaaaaaataacaaaaaattgtatatattattgtatgtgtgtgtatatattaagttgtatatacacatattaaatatatatacatatattacattttatacacatacatttgtttcctcatgcaatttgtttcagcagaagtaaaaattaaagatataagtaaaagaatatttacagaagcattatttttggtggcaaaagtactttaatatctttaaatgctcatataatggaagatagtttaactcttacaaagaacgagttagttggccgggcgcggtggctcacgcctgtaatcccagttttttgggaggccgaggcgggcggatcacttggggtcagaagttcgagaccggcttagccaacgtgatgaaaccctgtctctactgaaaatacaaaaattagacgggcgtgatggcatgcgcctgtaatcccagctacccggaggctgaggcgggagaatggcttgaatccgggaggcggaagttgcggtgagccgagatggcgccactgcactccagcctgggtgacagagtgagactccctcaaaaaaaaaaaaaaaaaaagtttgtggaaccaattccaatccagtccaggggagcacacactggcgaccaacatccccgctcaggtcccttcagggtcgagagagtgcgcctggaacagactgggaaactccagcaggcaaagtaatgtgccaggaataaagacaccgcctgacacattctccatgttccttacacccaccacgcttccatccggctccaactctgtcctctccccaggagcctcagattaaaatactgcaaggaagacaccgattctcaaagtcacaggcctaggaatctgagctacaaagaaaaatgagcccctgctcccccaactcccccctactcccctcagccccactgccctgcacctgccccctcctccgtaatttgaactgtcctcccagaagctggagagacggcccgcctgtgaggaaatagaggaccagcatgcggcaaatgcctgggttaggtaggagcagacggcgagattagcgcagggatgtaagaaacaagtggctctcagaccaaagaagactccgcggcagacggcacactaggccttcatagaggcgtgcgctggacaggagctcgccagttaccgaaagaattgtctgagaaaggctctgatctgacccgaaaggcccttggttcccacggcaacgcctcagcgtctggcagtaacaggctctgtgcccgggctctctggatctgcaggtcccgcctccgccagcctctcacagcccggaggcacctcccattggcgcctgacgggttggttagggcagcttctcttccggctgtgacaaatccagcctgaggagcgctcctgtgtctttcttagttgtttcttcccgcccacctgcccctcaaagccacaacccacttgcacgccaccgtgtggacaccttaaagcgaccttctagctctgaaccccgctgagggaatggtcaccttcgctcctattagatggcttggcccaaaggacctagcgacggcccagacaaaaatttcttcctacaagctccatgtgtctgtggtctctaagactcaaaaacaaacccaaaagaaaaagccaacccccaccccccgcaaaaaacaaacaaacaaaaacccccaaaacgccgccaacccacctttcacgagaggagtccttgagaagagcctctccagccaggaccaggtaagggaatctgtgcacttggccagacccagaacacacagtggcagggacctgacagccacactcttaccccatagaatctccaccactgacacacagatcaggatgcgtcaccatgagagatgacaccgcaaatctggctctcacggattgattccatactgtctcatcgatcccacacacatcccatcactgacaccagattccctcatcactgaccctacatacccacaatcattgattccatggacctcatcactatcccaaagaccacctatcagtaatctacagaccctcctctgtcaccccggggacctcacagattccccatccccgattccaggatctatagaacctcatctcttacccccacagacctattaataagagggtacattcatggaagactgtgttgaccattttacacacccactgcatgtgtgtatgtgtgtgtgtgcgcgctgattaatggacttaggtaaactttagcgttttggtaggcaatgcagtttttcaatgccttttctttttctttctttttcttaacatctttaaaggccttaccccagtaagtgtggattgcaattcattaatgcctatcctttattgagtccttgtcatgcatatttattaataataattcataattcttacaactcagagacaccagagactcacatgagaagaatggctgtggatttttatttacttatttattcattttggtttctgtagattataaaagtcattcatttgcatcaagtcaccaagtgtatactttgttttctaaaaaaaaattctaattacaaaaaaattgtttttagacagggtctcactctgtcacccaggctggagtgcagtggtataatcatggccaccattgcctcgacatcctgggctcaagtgatcctcccacctgagcctacctagtagctgagaccacaggcatgtaccaatacttccacctaattaaaaaaaaattttttttttgtagatatgtgggtctcactatgttgcagagactggccttgaactcctgggctcaactgatcctcccaccttggcctcccagtgttgagattacaggtgtga[140 bp omitted]cggtgaaaccccgtctctactaaaaatacaaaaaattagccgggcgaggtggcgggcgcctgtagtcccagctactcgggaggctgaggcaggagaatggcgtgaaccccagggggcggagcctgcagtgagccgagattgcgccactgcactccagcctgggcgacagcgagactccgtctcaaaaaaaaaaaaaaaaaaagagtaactttgggacctaatgtaaaatttccactgagatgatgcgtcagaaattaaggtagaataagatggtcctagggcatctgaaacaacggaaactcaatcttgggccaggcgcggtggctcacgcctgtaatcccagcaattgggagaccaacgtggttgactcacttgaggtcagaagttcgagaccagtctagccaacatggtgaaacactctctctactaaaaatacaaaaattagccaagattgcgccactgcactccagtctgggcaacagagggagactctgtctcaaaaaaaaaaaaaaaagaagaagaagaagaagaaacaaaatcttaatttcttcatcaagtgtaaaactgtggactggactctggaggaataatacataaaaagacacacaggcaattttttttttaagttttattgagaaatattaataacataccacagaagccacccattgaaactgtaaaattcaacggttttcagtatatttgcacagttgtgcaaacagcaccacaataaattttagatcattttcattaccctgaagaaaaccgcatatccctccatttccccccaactcccctaaccctgggccaccaccaatgtactttgtttctatgtattggtctattttggacattttatttaaatggaattacaaaacgtggtctttcgtgactggcttctttcacttagcatcatattttcaaggtttactcaatgtttcatgtgcagagggggcactttatgtaaggataaacctaggagggaggtgcttattgattttgaaacttcactccaatattgtaaaagggaaatgattggtttcaaatagaggaaaaacctattcgggctaaaatcctcccttttcgccagtttgtaatgtggggttttattgcgaagaatggcaaggtttttatgcatattttctgcaaattctccctgtgtttggggaacagtcacagaatgtggaggtgtgggcttctggactctgtggctggagattcaagtccaggagaactcaggtcccaggttaggcagagaaaaacagtccaagagtgccgatagaactctttgaaatagaaaatttaaaatgtcccctcccagagagtcccagataaccacacaaaagaggagtttgctgagctggtccgtcgcgattgtccaataagatgcagacagactgggaaagaaaggagtttatttctgcaaccggttagacggagaagccaagtaactcaccagaccaactcaaagtttcaagtttttttctagtgcttatatacatcttaagctcaatgctatggtgggactgcacctacaagcagaaatgttgcattcaatcaacatctaatctttaactacggtctagggtctggaaagatttctctagagtcttggaaagtttctgaatcttaagacaggcccaggtgaatgtgtaagaatactattattattcgatcagactttagggtctgagaggacccaggcggggtcttaatgggttcgttttcgcattccatccctgatactcaggcaccagtttctcaatttctttaacgtttaacttatgcattcatcaaaattatagtaaagtgttaatggaaactgttctggttgctaatggaaacctggcctgccacactgccgaactgaagcccactgcagaacactgaaaatgcctgcaaacactgactttactgacaactcttaaattacagaaaatcaagttcatgctgcctctccgatctgtcctacggaattgctagttacaaacgtgcacattgtcctaggttcggttttgcaaagatggagcccttcagcgaaagcatttgtttgatttcatgcattaatgtttcctctatccatttcctttttacttatttatttaaagacggagtttcccttactgcaacctccgcctcccgggttcaagtgattctcctgcctcagcctcccaaataggtaggattacaggcatgcgccgccatgccccgctaatttttgtttttgtttttttctttttttttttcttttgagacggagtttcactcttgttgcccaggctggagtgcaatggcgcgcgcgatcttggctcaccgcaacctccgtctcccgggttcaagcgattcttctgcctcagcctcccgagtagctggattacaggcatgcgccaccaccccggctaattttgtatttttagtagagacggggtttctccatg[140 bp omitted]caggatagtctcgaactcctgagctcaggcaatccagccgcctcggccgcccaaagtgctgcgattacaggcgtgagccaccgcgcccggcctattttattttattttaagacggagtctcactctgtcgcccaggctggagcgcaggggcgggatctcggctcactgcaacctccgcctctccggctcactgcaacctccggctcactgcaacctccaactctccaactctccaactctccaactctccaactctccaactctccggttcacgcgattcttgtgcctccgcctcccgactaggtgggattacaggcgcccgccagcacgcctggctaatttttgtatttttagtacagacgggggtttcatcatgttggcggccggactgttctctaactcctgacctcaagtaatcggcccgcctcggcctcccaaagtgctggaactacaggcgtgagccaccgcgcccggccccatttcctttattttattttactatgttcagacggagtttcgctcttgctgtccaagctggaatgcagtggcgcgatctcggctcaccgcaacctctacctcccaggttcaagcgattctcctgcatcaacctccggagtagctgggattacaggcgcacgccaccacgcccgactacatttcctttattttatttttatactttactagcctgtttgttgatcacaagactggcggtgcacaaggttgggtctcggtgttcaccgggcggtgggcgtgggcgaggtgggagggtctccagcgcctggtgctaatctccaagaaagtgcaggaaacagcaccaaacgtgattgcaaagttttggtttggcgcggcgggtaggcgttccagcgcagaaatgcgcaggaaagtttctgctgtgcttgtaggaaggtcggccacaagcacttcttttgttttttgaaaccgagtttcgctctgtcgcccaggcaggagtgcagtggcgtgatatccgctcactgcaagctccgcctcccgggttcacgccattctgcggcctcagcttcccgagtagctgggactataggcgcccgccaccacgtctggttaatttttcgtatttttagtagagacggggtttcaccg[134 bp omitted]cctgcatatccattggctgaaagctccgtctattttagggtgactgagagcgtctcttccttctgtgttgcctggaaacggactgttcgcctagtaacatctgatcacgtttcccattggtcaccgtttccggaagcccgctctcccgtttccggaatccccgcaggcgctgggtctgcagatggcgtccaggtacacagtggcgagtgtgattccgcagtcttgggctgtttggccaagcgcccgccggacatggtacgccgaagggtcatcggcgtggagtcctcgctttcagcgtccgcggctgggaaatcggccatcgctacggcgggaactgggactcgggctgcgtcccggcccttccacatcggtccaccgcactcgtgggcgcccgcattggtgctgacataatttcctgacctctgacccgtattgtctcgcgattaaaggtaaaaaacggggctttttcatcccactggggtaaaacgcccttttatttctagccaggtgttctgttgcagaacgcctcgaagggagggagtgaccggcaggttgaggtttattaaataaaatacattcctggtttatattatgtttataataaagcaccccaccctttaaaaaatctcacgttttgccagttgcattatttagtggactgtctctgataaggacagccagttaaaatggcattttgttgttgttgctaattaaaccaatttttagttttggtggttttcctaacagcagcaacttctcaggctttataaaatcatatttcttgtgggaaatttctgtgaaaggcgcagcgagttagtttggaattgttttaaaggaagtaagttcctggttttgatatcttagtagtagtattttccccagtgtctttgaaatcttatttttggagcacgtatgtagagtaacttttgtgaaagaaacaacttttattttttattattatttttttttgagacggaatttcgctctcgttgcccaggctggagtgcaatggtgcaatctctgctcactgcaacctccgcctcccgggttgaagcgattctcctgcctcagcctcacgagtagctgggattataggcatgtgccaccacgtccagctaattttgtatttttagtagagatggggtttctttatgttggtcaagctggtctcgaactcccgacctggggtgatctgcccgcctcggcctcccagagtgctgggattacaggtgtgatccaccgcacctggctgatttcatatatatatcttcctaaatcctttaaaaagttagtggatctcttacttttgtaggatttatttcatagtgtgaatgagacacctgtaggctccaggtctctgtcttcatgaggtgtgaagattcagtgctttataaaacagtccccacattcttcaaaggccttgttcttaattctcagcacgcttgtgcttctgacattgttactaaaattaagctaagtttttctggttatgtgagagctgtggaaatgtccagcgttagccactaatgtttctccttgatatttctccgtatcttaatactgactctcaatccattactcagatgggtgtccttttcctggatgtctggaaactaagcctggctatccctctgacctccctgccgagctaccatttttttcctctctcttttcttgtctacacttgagttggtaacctcagctctttcatgagcaaccttgatgcctttgactccttctgagtttattacccacagttccatcagccaagtttaggggcccatgagaagggctcgtgtaaattttcacattcctctaaccaaaatgtagtgtttccttccatcttgaatataggctgtagacccctcgggtatggggtattgttggcagtgagaccacagcagtttttatgtcatctgacagcatctacaaatagccttcatggttgtcactgctttccaagacatttccaagtaacagttcccagtgatgatttactactcgctattgttacttaatgtgttaaggtggctgtcataggcactattactatgtcagaaattacaccaaaatttagtggctcaaacaatcattatgttatgtggattctcatgctcacagtcaggatttcagatatggcacaagggtagcccacttgtctctgttccatgatgtctggcctcagcacggaagactcaacggctggggtctgcaaccatttggaggcttgttcccttgtggggaaaacaaagagagatcagactgttaccgtgtctgtgtagaaagaagtagacataagagactccattttgttctgtactaagaaaatttcttcggccttgagatgctgttaatctgtaaccctagccccaaccctgtgctcccaagagacttgtgctgtgttgactcaaggtttaatggatttagggctatgcaggatgtgttttgttaaaaaaaagtgcttgaaggcagtatgcttgttaaaagtcatcaccgttctctaatctcaagtacccagggacacaatacaaagatttctcctcatgcgatagcctgagatatggcctcctgggaagggaaagacctgaccatcccccagcctgacacccataaagggtctgtgctgaggaggattagtaagaggaaggcctctttgtatctttgcagttgagatacgaggaaggcgtctgtctcctgctggtccctgggaatagaatgtctcagtgtaaaacctgattgtatgttccatttactgagataggagaaaaccaccttagggctggaggtgagacttgctggcggcaatagtgctctttaatgcactgagatgtttgtatacgtgcacatcaaggcacagcaccttttcttaaccttgtttatgacacggagacctttgttcacatgttttcctgctgaccctctccccactattaccttattgttctgccacatctccctgtctgagatggtagagataatgatcaataaatactgagggaactcagagaccggtgccagtgcaggtcccctggtcccacttttctttgtctatccttttttttttttttgagatggagtctcaccctgtcgcccaggctggaatgcagtggtgcaatctcggctcactgcaacctccgcctcccgggttcaagcgattctcctgccccagcctcccaagtagctgggattacaggcgcgcaccactatgcccagctaatttttgtatttttagtagagacggggtttcacta[137 bp omitted]tctcgtcccacctgacgagaaacacccataggtgtggagggggcaggcaccccttcagttgggcaaatggtctaatatttctttttttttttttttgaaacagagtcttagtctgtctcccatgctggagttctgtggcaccgtgtcagctcactgcaacctccatgtcctgggttcaagcaattctcttgcctcagcctccagagtagctgggattacaggcgcccaccacgcctggctaactttttaatatttttagtagagacggtttcaccatgttggccaggctggtctcgaactcctgacctcaggtgatctgcccgcctaggcctcccaaagtgctggaattacaggtgggcgcttggccaaggggctgatatttcttaagggcttcccctgagaaagaagaagccaaacctactcaggcaaatcttgtttatttattcttctaggtccagatttggaacaaatctctctagagattgaacaggtaaggctcacctttcaataattacaccaagaaaggcctagctgatgacttaagctatggttttgggcagcacgagagtggtcaggtggacagtagggaagtctatacaacccaaagggaaaagagaaaaggcccatgagaaatcagggcaaattgccacagtgtgtttttcttgatggtgtcactgaaatgtgggttaccttcccactgtgtcccccaaaggacatgaggccacagactgcagtgcccgtgagcagaggagctgtagggacggtggtttgatcgctccattcaaatgcacaccccggtgcctgtgcgtctcttctgatgcagggccccagtgggtaagctctgtgcttctccacacagtggattaggagtggaaacattctgtctgtttagcgcttgatggtttggtggtgacctcatgtcatggtgattagagccagtgatcctaacagtttaaaattgttgagcttgtgggtaggtatttgggagatagtatatgtgttacctagtgtttgtcatccgcagtggttttgttactttttgcataaactgcggagaaagtttactaactgcagatagtagagaaattaccagtcactctaaaatcctcccatttcttggtctagagctgcgcctggatccctcagcagtgaggagacctgaagaccagaggaaacacagcaagtaggccctttaaaccactcacctgtgttgtcttccaatttattctgttttattttgtttccatcattttaaggggttaaaatcatcttgttcagacctcagcatataaaatgacccatctgtagacctcaggctccaaccataccccaagagttgtctggttttgtttaaattactgccaggtttcaactgcagatatccctggaaggaatattccagattccctgagtagtttccaggttaaagtcttataggcttcttctgttttgaggaggagttcctgtcagagaaaagcctgatttggatttttaactttaatgcctgtgaaatgctataaaaaataattttctacccctaacattaaagtactgttagtgagaaattaaaattccctcaggaggattaaactgccatttcagttacctgaattccaaatgttttggttgttagaattttctttaatgttcatgaggaagtgttttatattttctatcaagattaattctctttttttttttttttagacggagccttgctctgttgcccaggctggtgtgtagtgatctcagctcactgcaagctccaccttccgggttcacaccattctcccacctcaacccccggagtagctggaactacagcctcctgccaccacgcctggctaattttttttttgtatttttagtagagacggggtttcaccatgttagctaggatggtctcgatctgctgacctcgtgatccacccgcctcggcctctcaaagtgctgggattaaaggcgtaagccactgcgcctggctgttttttcatttctattatgatttgtcctgtggaatgtcagtgacttagcggtatttttatcacacgtttataaagctgaatagttttgtatgtcagctcagcacccttagtgtcagccatgctagtctcctgctgtgcatagatcgaggcctgtccatacccgaatctcctgggttcccactgtcagcacctgaaggtacccaccagatgtgtctgtcacttccctacatccacctctattgtggttctcatgtttctgcctccctagagaccatttctctgtagagcagcgctttcgaatagaaatacaatgccagacacataagttgttttagattttctagtagtcactttagaaaagttaaaaagaaacaggtgaaattaatgttttatttcacctaaaatgttagcattatccaaaatatcacttcaacatcttatcaaaataaaattattaatgagattggttaccgttccgataaataggtgaactgagagcatacacagtagtattctgttctaatttctgcttcactgtgagtgtcttgacatagtcttaaaagagtattgctgtgaaatattatacatgtaactcataacctctacaattctgcagttgtaattggttgtcttacctaataatcagttgctttgcttcataatatttaaattggcatctctattttccaaaaggcataaatactagtatagttttttagttaagccaggagaaagttcactttatttacataacttatacgtaaaaatttaataaatctccctgcttcttttcttttgcatcataacaaccactgaaaataatatttctatggcagttgggggtaaatggacaatagcttttgtgaccagaggtgaatggcccagggtctccagcactccaggtcccactgagcctgccccacagctgagggcatcggtatttccacacacctataatgtacagtgccccagaacagagatcggatgctctgctttattcagatggggtgttgagagtattgtcattgtaattgaattagtaagtaagtatttatacactgttaaaatctggttggatttgtgtcccttcacaaaacaaattgcttaaatgaaaccacagagttaacataattgactacatctgcttctatgagctgctgttctaacatttaactagaatctaatttgaaattagtcaataaaaagtttattcaactgaattatatttagactttttgttgttgttgttgttttgagatggagttttgctcttgtagcccaggctggagtgcaatggcgcgatcttggctcactgcaacctccttctcccgggttcaggcgattctcctgcctcaacctcccgagtaggtgggattactggtgcctgccaccacgcccagcgtgaagcactgcacccggccttcatagattattttactttattttagttacttatttttatgactttattgttataaaaatgcttgtttttaaaaaaaatcaaccagtataacaaagaacaaagaagataatcaacaagcattcccacctccatgatttagaaataactgtcatcaatacaggaaaataccatgccattctttctcctctaggcacatggacagacagatagaaggatgggaaaatagatagatggtccaggcacaatggctcacgcctgtaatctcagcactttgggaggccaaggcgtgtggattacctgaggtcaggagtttgagaccagcctagccaacatggtgaaaccccatctctacttataatacccaaaaaaaaaaaaaaaaaattggccaggaatggtggtgggctcctgtaatcccagctactcaggaggctgaggcaggagaatcacttgaacccaggaggtggaggttgcagtgagccgagattatgccattgcactccatcctggacaacagagtgagactccttctcaaaaaaaaaaaaaaaaaaaaaaagaacagttgatgaaggatggatagactaaaacaatgctgcattaatgaggctacgatagtgcgtatttgtataaaaagcattaatttgcatttgttggcattttgaagctctgttgttggatgcatacacatttagtatctatatgtcgttatgatttgtaaatcatgtaatgcgtctctttacataatgatttttaaattattttgtaatgtttctcattacgttatgtaatgcccttattaactttccttggaaatcttttttacccgttatccatacaaccactcttgctttcttaatactgatgttagcatgatataccttttttcttttgttcgttttttattttaactgtcaacttacctatgctgtgtttgaagtgaggttcttgtacgtggcatgtagttgggttatgttttattttatttaaactgccatctctgtcctttacatcaaaggtaaattgatgttcttagaccacgtacctttaaagtaattcttgatgtgttaaagcttaattctgccattttattatttgttttctgtttgtttcctgtttccctgttctagtcttccactggatacttgatcacttttaaaattccatcttgtttaatttatactgtatttgagtatatcacttacatagttcttttggtggttgctctaggtattacagtatatatctataacttagcctattgctatccacatttaagtacttgcagtggagcattgaaaacttactttcatttaggtctttaccctctctaccttttagatataattgtttccaatgtttcctttttcatattgagcattccaacatatgcttttataatttttgcttgagtcatcaaatatgatttcagaaattcataagaaggagattcttacggctttgtggccctagatatactgcctgtagtatactgaccagtggctccagacctcttttctttggtgggagagggtctggcacttgggtgggccttgccaaaattttctttctctgttgttgaccatcatctccctctgaagtttactgcctgacctgtttctgtgtttggttactccaggtgaacttgtgctatttctgttgtctttaggttgagagtggtagaacttttttttaacttcattctatcatctttaccccaaagtcttacatttttaataaaattaaaagccaccatttttggtcctttgtcagtgacagctatctaaagaaagacattagcagctttttagatatttaaggaagtttctgtcattctttggttgtcatatctttaggaaacatttttttccctaaattactccaaattaaattaatcctacagttggtctaatttaattttttttttttttttttttgagacagggtctcattctgtaacccaggctgaagtgtaggggtggaatcataggttattgcagcctcaaactcctaggctcaagagatcctcccacctcagcctcccaagtaactggaactgcaggtgtgcaccgccatgcctagctaatttaaaaatttttttgcagaggtggggttgggtctcactatgttgcccaagctggtctcaaatacttgagcacgagtgattctgttaccctggcttcccaaagtgccgggattacaggtatgagccaccatgcctggcccagttacttgctttttaaatagctcaaaagtttttcatccttttaaccaaagttgccaaatctaaagcattattccttttggtcatcaagtagaggaatggatgaatatatttcagtttgcttattactaaaatatgttagtaatagcatattttattcaaatcactgcatattagctctgtcttattttccattttcatgacaaacacacccaaagctcagctcactgtatttactttcttttcatgatactgtttgctaagttttttctgtttgcttcaccatattttgaacaat[137 bp omitted]agaccatcctggctaacacggtgaaacctcgtctctactaaaaaaaatacaaaaaattagccgggcatggtggcaggtgcctatagtcccagctactcggaggctgaggcaggagaatggcgtgaaccctggaggcggagcttgcggtgagccgagatggtgccactgcactccagcctgggcaacagagcaagactgtgtctcaagaaaaaaaaaaaatagtttgtgttttcaattgtcttatttagacaaactctgtagtttcaaagttatctttttcttgcctgatgcctttgatgtttgatgatgttaataatatactattttcaaagccaatttcttatttctacactgatattggaaaaagaataaagtgatgaagtcaacaggtgttattaaaaaatgtgaataacaggaaaatgttttgttgtttgttttgttttgtctttgaagtctttcacagactagatttgaaggtttatgaaggatagggcaaaattttctaaggaaagttgcatcctatgacctcaggctgacttcaagtaagagtggatttgataaaggcattgtctttcttagagtatgtgcatcttggcagaggagcctggagaggcagtatagaaggattgttttagatgttggatctctgtaacctgcatttacattttgttgagccgttgtcatttgggggaaaacacgaaaaagaaaagatcattatcatgctactataatgcacatcacatagaattgcaatgatttgttggttgttcattccagtccaagaactgtgagtttctccagccaaaggtcttgtatttattgatctttctgtcccacaggcctaaaacagcagttggcccatggacagtttaataaatgtttgctgactaatagatagggtatctaaaatcttttccatggccttatctctggagattaaaattttccagcacttgtctataaaagatgtctatgcgtaactgtagggaagacattgtaatttctgaagaggaggagcaaaccgacaaggttattgtagcattgattataatgcatggtagcagtctattctcagacctttagatgcctatttacctgatgcactggcaccaatgcccccattttggtgtgccatcttcccttcaccacttgggacaacacagataataaaatcagctccaaaagctaacccatggtggatcccttcacaccagttcacggtagaaagtaacccccttgcttgtagaaaacattattattattattcttcagatggagttttgctttggtagcctaggctggagtgcaatggcgcgatctcggctcactgcaacctctgcctgatgggttcaaacgattctcctgcctcagccttccaagcagctgggattacaggcgcgcatcaccatgcccagcaaattttttgtatttttagtagagatagggtttcgctatgttggccaggctggtcttgaactcctgacctcaggtgatctgctcgcttcagcctcccaaagtcctgggattacaggcatgagccactgcacccggcctagaaaacatcattaaatagcaaacagtagcagtgtgcttggggattttaggattgattattttcaaatctctagaaaagctcaatgtattaccttaggctataatccctgggcagagtctcatctgttaatgggagctggtctaagggtccttccagctcccagattgatgatttcccaggttgatctgctccctgccacccacccatcctcggttttgtttgtttttacagagataatgtctcactatgttgcccaggctggtcttgaactcctggcctcaagtgatcctcctgccttggcctcccaaagtgctggagttcctgatgtaagccactgtgctcagcccatccttggctgttaaagtgtggaggtaaacagtagatgccaagttttcctccaggttagaagtggcagatgccccagtacagaataatgtccctaaccaggcctcccactgcatgaagaccttattttctggagcttaaacctggacaaaggtctgaccagtagcactatgttcatgaatatcaggtcaaaaatttaaaactgggactatccagaggaacctggtagctgcaagtgtagtctgcagtccaatggtcagctatgaaaacaggctacttgtactttctgtttgtcatggagtctgatgtaaaaattgatgacactttctaacttctggtgtgcttcccttccttgttcattttccataagtagcttcctccatccctcttcccaacaggccacagtcaattcaggacattttaaccatgaaaatgagtctctgtaagaggaatttagaggccaggcacggtggcccagcacttcaggaggttgaggccagcagatcacctgaggtcaggagttctagaccagactgaccaacatggtgaaaccctgtctctactaaacatacaaaattagccaggcatggtggcgggggtctgtagtcccagctacttggaaggctgaggcaggagaatcacttgaacccgggaggcggaggttgcagtgagctgagattatgcctgggcaagaaaagcaaaactccgtctcaaaaaaaaaaaaaaaaataaggaatttaaaaattaacatagaggaaggaataaaggggccagccccttaaaaatcccccaaacctctttaacaggagtttaggttataatataaatgtgttgagggtactttttgcctttgttgatgaaggactctagtgagattgtgctgatgatattgctgtacttggaatggactggtcctttcatttcctggatttgtctctttgttcttttgagttcaggcataacttatgttaatacactttgcagatactgtgtttttgacaaattgaaggttttggcaaccatgcgtggagcgtccatctgtgccacgtttctatcatcatgtggtcagttggtgactctgtcacattttgctaattcttacaatacttcaaattttccattattattactctgttatggtgatgtgtgataggtggtctttgaggtaactgttgtaactattttgggaggtcatgaaccaggaccctatatgatggcaaaattaattgataaacattgtatgtgttctgactgctcccctgcccagctatttctccatctttctctcctttgccctccttactccttgagactcaacaatattaaaattatttcaatgaataatcctccaatgccctcttagtgtgcaaattaaaggaagacacatgtctttcactttcagtcaaaaccaagaaacgattaggcttaatgaggaaggccatgttgaaaactgagacaggctgaaagctatacttcttgtgccaaagttagccaagttgtaagtgcaaagaaaaagttctcaaaggaaattagaagtgctactctggtgaaaacattcatgataagaaaacaaagccctaattactatggatattgcctagggtagtactccacgccctctgggcacacaatagatattatctgatgaactggaaaagagcaaaccagaagtggctttattttcccacttggactcccttggactgccttggactaatttttaagtcttggttggaaatcaccgagtaggttcataaggtgcatgacagaaataagctttatagtggcttactttcatttagttctggaagtttacctttgccttagttttggaagtaaattctagtttgtagaaccatttttgttgctctttcttcagtcttgatattccattctcttctgtccttcctaatggaatttatgcattcttttacaacaggtctgttggttataaattcccagagttttccttcatctgagaatgtctattttatgttccttcctgaaagatatttttactggctatagaattctgggttgaaagttcttttctttcagcacttttctcctacacagaaaaatgcactactcccttctggccttcatggtttctaactaggaatccaccagcattagaatcattgttatggtaaagtgatggttctcaactgcgaacatttccacacccaaacaagcatttggcaatgtctagagacattttgtgcttgtcacaactggaaattgctactggcatctagtgagaagaggctaggggtgctgctaaacatcctacaacgtacagcaaagcccaccagagcagagaattatttgacacaaaatgtcactagttccgaagctgagaaatagttacatatgtgtcatttctcactgagtgctctcaagagttttgtctttaattctctgaaatttggatttgatattctagacatggatttcattgcatttattctatttgggtttcattcatcttcttgaatgtgtaggtttacatcttttgccaaagttgggtagttttaaggccttctttcttcaaatatatttttagctctgctccttttctgtttctgggactctgatatgaatgtttgatcttttgttattatccctatggcccatgggcttccattctttttttcccccaattgattttatttcttgtctagaatggataatttctattgatgaatgttcaagtttattatttcctctgccatctccattctgttattgagccaatccagtaatttttaaaaatttacttgttgaatttttcatttccatttttttctatttggttctttgttatatcttctatttctttacttagtgccccctcctttaatttgatttaagagtgtttgcaattgcttggtgcattttaatgataggtctcttaaactcattgtcagtgaattattaatggcaaaaactgaaattacttttgcaccaaccaaatacagtatcagtgtaatcttggtgttggtatctgttctctttttctattaggtttagatttgcctggttttggtataatgaatatttttaattgtatccttgatattttgagtattaggttatgaggcccaggtttctattcattttgtgtttaactttttaagaaactgccacactgtttcccaaagtaattgtaccattttaatttccaccagcagtatgagcttcacctgcttcttatcttcactaacacttgctatacttagctttttaagtgctagccattatattaggcacatagtgttaacttattgtgttttaatttgcatttcacttgtgactaatcatatgtttatttgacatctgtatatcttctttgggttgttgaattttaaggtctttttatattcaagtctttgtcagatatatataagattagaaaatattttctcccagtctgtggctaatcttttccttctcttcacaaagtcggttaagagcaaaagctttcaattttgatgactaattaatttatttgttaaggacttgcagtttcagtaacatatataagaaatttttgcctactccaaggttctgaaagttttatagttttaagcatatgatacatttttagttaactttttttttttaagacagaatctcactctgtcacccaggctggagtgcagtggcgcgacctctgctcactgcaacctctgccttccaggttcaagagattctcctgcctcggcctcccaagtagcggggactacaagcttgcaccaccatgtccagctaatttttctttttttgtattttcagtagagatgaagtttcaccatgttggccaggctggtcacaaaccagccagcctcagctgatctgccagcctcagccccccaaaatgctggaattacaggtgtgtaccaccattcccagcatttagttaacgttttttgtaggtgctttgagctataaatcaatgtaaatttttaaacatatatataacaagttcttctagcattgtttgttaaaaagattacctcttctttaataaatttcctttgcaccactgtcacaaatcagttgtccatgtatgtgtgtttctcaactctctattttattccatgaataccacacagtcttgattactgtagctttataataagtcttaaattcaggtaacatatgttctccaactttttctttttttttttttgagtcggagtctccctctgtcatccagactagagtgcaatggcgtgatctcggctcacttcaacctccgactcccaggttcaagcaattctccctgcctcagcttcccaagtagctggaatttcaggtgcctgccagcagacctggctatttttgtattttttagtagagatgggttttgccatgttggctggtcttgaactcctgacctcaggtgatctgtccaccgcagcctaccaaagtgctgggattacaggcatgagccatcgcgcccagcctattttccaactttcagaattatttttaaaagttgttttcactaatctaggtcctttgcatgtccatatgtattttagaattgagttcccaatttctacaaaacaaaaagcctcctgaatattcaaaatgggatttcactgaatctataggtcaggttggaaagaattgacatattaatggtattgagtcttgtagtctctgaacatagtatatctctatttaggtcttttttaaagttctcccagaagtgtttttaatttttatactatacatcttgcacttcttttgccagatgcatcactatgtatttcatattgtttatggtgttataaatggcatttaaggttttaaggttcagattgttcatggctagttcatgcaaaatcatctgctttatatatattgatctttattttgcagtctcactaagctcatttagttctaatagtgttgtagataccttcagattttttttatatagacaatcatataatctgttaataaagatgattttacttcctttccaatctggatactttgtattctttcatttattgcactagctagaacttccagtataatgcttagtggaagtgtttagaccaggtatcctctttttgctgatctttggacttttaccattaagtatgatgttagcagtaggtttctcacacatactctttattggttaaggaaattcccagaatcccagaattcttttcctccttaactgaattattctccttaatgaatgctggatgcctagtaaattttttattttattttattttttaatttttatttatttttttgaactggagtctcgctctgtcgcccaggctggagtgcagtggtgcgatctcagctcactgcaacctctgtctcccgggttcaagtgattctcctgcctcagcctcctgagtagctgggattacagacctggcgggtttttttttttggtatttttagtagagacggggtttcaccatgttgatcaggctggtctcgaactcctgacctcaggtgatccacccgcctcagcctcccgaagtgctggaattacaggctcgagccaccgcacccagctgatgcctagtaattttttattttccactttggctactgggaaaaggaattattcctggacgtttttgagctctgtggattcttccctctaatcctttaaggtaattgtttttccctggcttcaggtagttttcacacacgcacgtgttgatgaatatttagctgaacttaaaggaagatcctctggagatttccgtgcagttctctcctcttcagtgttttgccttgtcaactcgggccactttggcctcatcagactcctcattctatctaaacactaggagaccaccaggctctgcctgagttactcctcccagcagtaatctggaaaaactaggaaaaatttatttctgtttttttcagggatcactgttcttcattggaaattgacattttagtatattcaatgtcttaaaaaccattgtttcacctatttcgtttagctttttagtatttacagatataagggtaaatctggtctgtttctccatttgatcagaagcagacatctgttcattctgttactggtgactttcagttaacagaataataaaattaatatgaatatgccacacttttctagttaaaatgttttgtctaggaaatattctttactgtgaggttataaaatgattctcagataaaaacaaggtaaaatcaaaggtgactactttccaaccttgctctctcccacctatagtttgtattttaatttttcttaagagacaggggttttgctatgttgcccaggttggacttgaactcctatgctcgagggatcctcctaccatgtcctcccaagtagctgggattacaggcgtgcaccaccacaccctgctcccacctattatttcatcattttgattaggtcttgg[135 bp omitted]gaaaccccatctctactaaaaatacaaaaactagctgggcatggtggcgcatgcctgtagtcccagcctctcgggaggctgaggcaggagaatctcttgaacccgggaggcggaggttgcagtgagccaagattgtgcaagcgcactccagcctggcaacagagtgaaactccatctcagtgtacttgtcaccttaaaaaagatctagtcaacatgaatgaaaatggcttattacaatacagttacataacaaaaaattatttttcacacaaattgtgaaattccatagatgacaataatttaggagggaactacctgttaaaggtgtgacttacaaaatgtgctaaatatgtgtacatatagtcaccatttcttaactcatgtaacactaaaagataccaagaacttcacttagaagaaattgataaagtaacttttcatcattcagaattacccatccaggctggtcacggtggctcacacctgtaatcctggcactttgggaggctgaggtgggcggatcacctgaggtcgggagctcgagaccagcctggccaacatggtgaaaccccatctctattgaaaatacaaaaattagccaggcatggtggagggtgcctgtaatcccaggtactcgggaggctgatgcaggagaatcatttgaacctggcaggcagagattgtaatgagccaagatcaccccactgcactccagcctgggcaactagagtgagactccacctcaaaaataaaaattatccatcctgctcagagcttaaacattataagcaaatatctactatattattctttgattaaatattgggttcatctatgtaagtttttttcatgtatcttcatgagtgaaatttttctggaatttgatgttcaagagctatcccatctacttttattataaaaatgttagtcttttagcatgccctggcaaattttccataggattttctattcttcagggtgtagcctgtacagttttctagtcttacatgtttgttttgttttgttttagacagggtcttgctccatcaccgactgcagtgcagtggggtgatcacagcttactgcagcctcaaactcctgggcccaagcagtcctctcacctcagcctcctgagtagctgggaccagaggcatgtgccaccacacctggctaatttattttttgcagagatgggggtctccctatgttgtccaggcaagtctggaactcctggttcaagtgatactcctgtctcaacctcccagagtgtttggattacaggcatgagccactgtgctcaacctcatcttacatgatacttttttctattttttgaactttttgggttgtttttgaaacttaatcatatttaataatgttttcctagaaaaaaaccgtacacatataaaaatcatgtctaacagagttcacatacttaatactaaaaaatatctccaaacatatagttatattccatttctccttataatatagtagaggcactgacaaagtctaatgaataatagttttcttcaaaggactagattttgatgaaaaacctgtatggttttttattccatgatttcagcttttcattaagcctttccattcattcatttggggtatttgttcttattctaccttgctgtgtaatcattatttaactcaataaatatttgaggccctacaacattataggcactgtcctaagtgctgtggatacagtgctgtggatacagtgatgaagagaaacaaactgccctcagtcttcttggttttatacacagagcaatttctattgataactgttttagttatttcacaggatttaaaatataggtctcattatcattctaaatactctgtaatttcactttttatttgctctttaatctaagaatggtttatatatagtagtaaatttcaaagaggtaagaatccatatggctatccatttgctagtttctgagttataactgtggtaaagaattatataacacttggctttagaaatttgttagagagaagttatttctgaatgtcttttaaaaaactgctgaacactcaacaaccccacttttactaaagtcataaggctttcttttataggtttttttgatgtagcatgtgaaattaatattcaaagctttcttcattgtattttactgattttttttcagaattaacattctgatgttcagtaagacataaatagagatgacatatttgtctataatcattatagtcttaaaagtcctcctctcataaaatggcttaataccaatacaaatgacagtcactaagtcatgtaaatctcaaatcattcaacccttataatctaatgaatacgattaaacagacatagatttaagatactttccaaaaaaaaaaaatagaggcaggatgtattgaaacaagacatgccaaataaattgtatgacatagttcaaggcttttctagattaattacatgatttttgtggaaatacaacagaattttgctaatgatgaaagatttccaaaatgaattatatataaattcttgtgggtttttgtttttgagatggagtcttgttctatcacccaggctggagtgcagtgatgtgatcttggctcactgcaacctccacctcccaggttcaaggaattctcatgcctcggcctcccgagtagctgggactacaggcgtgtgctaccacgcccggctaatttttgtatatttagtagagacagggtttcaccatgttggtcaggctggtctcgaacccctgacctcaggtgatccacccacctctgtttcccaaagtgctaggataacaggtgtgagccaccatgcttggccaaattatatataaattctttatgcaacatctctgatgagaatgttttgagaatgattcaaaaagaattcatgctatctcataaaattttaccctgatattctgcaattgataactgatcagtaatttctttcctatattgattgcatgatgaattctctgctgctgctgctgctgctgctgctggatgtgtgctctgttaaaatgccttccaatattacttacatttgtggtgttcctcaagagaaaaaaataaatgacatcaattaatgagtcatgaataaagcccttcctacacttttatataatatttcacaagagtgaaatgaagtgagagcttgaagaaaatgctttctcaaaatctttaaattcataggatttctcaaaagtgtaaatattctggtgttgagcaaagtttgactcatgactaaaggtgttcccatagtctgtccattcacagagatttgcactattatgaattttttgttcagtaaaatatgaatggtgactaaagatgtggctacttttcttgcatccataaggttctgcatcagtatgaattttcttatgtcgtgtaagctgtgaaccccagataaaagatttcccacattctttacatacgtaaggttcctcaccagtatgcattctctgatgtcgagtaagttgtgaaccccagagaaaggcttttccacattcttcacattcatatggcctctttccagtatgaattttctggtgtcgattaagttctgaaccacgaaaaaaggtctttccacattccttacattcatagtttctctcaccagtatgaattttctgatgtcgattaaactctgagccatgaagaaaggtctttccacattccttacattcataggatttcctctcattgtgaattttctcatgttgagcaagatacgaagcccaagtaaaagtcttcccgcattgcttacattcataaggtttcctgccagtatgaattcgctgatgtcgagcaaggtgtgagctccaaatataggctttcccacatttctcacatttataaggtttcctaccaacatgaacattctgatgttgagcaagatttgaaccacgaataaaggcttttccacattccttacactcatgagatttctcaccagtatgaattctctgatgctgagttaggtgtgatccacgagtaaaagctttcccacactccttacattcataaggtttttcaccagtgtgaattctctgatgtttaataagatgtgatcgctgactaaaggcctttctacattcattacattcatagggtttttcaccagtatgaattctctgatgtcgagtaagatctgagccacaactaaaggccttcccacattccttacattcataagatttctcaccagtatgaattcgcttatggacactaagttgtgaatgaaatctaaaggctttcccacaatccttacatttaaaaggtttctcaccggtatgaattctcttatgaccagtaagactcgaacgtaaactaaaagacttcccacattctttacattcatatgttttcttaacagtgtgaactgtctgatattgaataacttctgaatcaggaagaaaggtattcccacattctttatctccacagaatttctcacttgtgtgaattaactgatgttgagtatgatctgaaccagaaataaaggctttccccagttctttaaattcattcagtttgtctcctgtattaagtctctggtgtagattaaacactgtatgctggttaaaagtgggccttttttcacaggtgcgtatcacctgcttgaagcattcctcttgattatcttgaagtgtttgaaactgagtgttgccttcccagtcacctctaaaacataaacagtcaaggctgtggtttttacaaattctcattatttccaattgggctatttctctctcaaaaatgccattttttggtaataacttcttggtctgacacctcgactgcatgtctgaaaaataagaaggtaaaaacatcatacggttgtatgtacaaaaagcaatacaacttctaaaatagatatagaaaatcttgaagtaaagcatatgagaagtgaatggcttagaaaattctcaaatatgagcaatatgaaaaaaagggcaagaaataagtagaaatttaaaagaaataaaagttgagtcaagtgatgagaaatatgttttattttgatcatattcatctgaggagctcaataaaaaatgattatccaggtatcacctcaataacagaataataagtcataaaatacctacaagtttccaagtactatgatgaatgtcttatataattcagagcttaaaaataggaatgctgggaaatagcagaatatcagtctaatatgagggaagtaatctgatccagagttaccaaagtactaggatctcaatagcagggtatgctgcatttaggttaaaggagataattatgggtgatagttcagacagaaaaatagtttgaaggccaggtacagtgattcacacctttaatcccagcacttggaaaggctgaggcagatggattgcttgagcccagaagtttgagaccagcctaggcaacatggcaaaaacccatctctataaaaaattagccaggagtggtggtgcatgcctgtggtcctagctacctggaaggctgaggtggcagcatcacctgagcctaggagatgaggctgcagggagccatgatcacactaccacactccagcatgggtgacagagtgagaccctgtcttttttttttttttttttttaatactttgagttttagggtacatgtgcacaatgtgccagttagttacatatgtatacatgtgccatgctggtgtgctgcacccattaactcgtcatttagcattaggtgtatctcctaatgctatccctcccccctccccccactgaccctgtcttaacaacaacaaaaaaatagtttgagaaattttttcaagggagaaggagtctggcacaagctaagaataagtactcctctgtgactcttttttctaatgtatatatttaggatcgagtacaattgttatcagtttttcttgggagacagcaagtactctagcagtgactcaatgaattgaaaggcagtttagttacaaagtatgagcagtaatgtactgcaatggaaagatgacaaactgcagtttcagactctagttctgtttactaaaactactttttaggtgattggaaaattactgagcttgactgagctcttaatttttcatattataaaaaggaataaaacatcactttgcagaggtttgttgcaaggattgggaataatacgctatttctattaagtgcctgacacaggatacgtgttgaataatcagtagctgatgattattattagagaggaaaagctggagaatacggggaactagacaagtcagagtttgtctttttatttatttatttatttatttattttgagatggagtctcactctgtcgcccaggttggagtgcagtggcgcaatctcagctcactgcaacctccgcctcctgggttcaagcgattctcctgcctcagcctcccaagtagctgggattacaggcgcccacccccatgcccagctcatttttgtatttttagtagagatgggattttgccatgttgtccaggctggttttgaactcctgacctcaggtgatgattcacccgcctcggccttctaaaatgctgtgattacaggcatgagccaccgcgtctggctgggcttgtcttttatgacactgtgttcttctcgttgtacttcataagccctaacctttcttctgccacttcctcctcactgtgaccagaaactgttatcacctgttactctgattttcaactaagcagcctattaggtcttctcttaatgttccctgtatgcagaaatgtgtggccatgttccaatcacagaagagaacaaaaagtttcttaagagacaatatattcttgttaattcttttaaacctaaaataagaaaatccataaatgttggttaaaagaatgaactaataaggagaactaataaatgcaggcaatgtacaatcaaggagaagataggaaaaatgacaaaaattcaaaagggatgggtaaaataaaaaaatgaggttaaaaaaatttttttaactgaatgaagaattttacgaaaattaaattttaaaaaagggagatgagaaggaacttgatccaaatcatagataaaataagggccactggagaaaagaatggcacttacctttttgttacatgagtgaaaaatgagagcacaaaaatagagtggtatttggagtgaagagaaagttctttgagaaaaggttttgtctctatctaggcctcaggcccttattaaagtgttttttgtttgtttgtttgtttgttttgttttgtttttgagatggagtctgactgtactccagcccaggctagagtgcagtcatgcagtcttggctcactgcaacttctgcctccaaggttcaagcaattctcctgcctcagcctcccgagtagctgggactacaggtgtgtgtcaccacactggctagtttttgtatttttagtagagacgaggtttcaccatgttggccaggctggtctcgaactcctgacctcaggtggactgcctgcctcggcctcccaaagtgctgcaattacaggcgtgagccacggcacccagccagtttttgtttttgtttttgttttcccctgagacagagtctcactctgtcgaccagactgcagtgcagtggcacgatctcggctcactgcaacctctgcctccctggttcaacaattctcctgcctcagcctcccgagtaggtgggactacagctgcacgccgacatgcctggctaattttttgtatttttttgtttttgtttttgtttttgtttttttagtagaaatggggtttcaccatgttgcccaggctggtcttaaactcctgagctcaggcaacccaccaaagtgctaggattacaggcgggagccaccacacccggcccattttttggtcttaaggggatattccagaccaatatttcagaggtgttgctgcctcactgtgcagctgagctgttatccacaacaatggcctccttgtgcgtgttcagccctcactcacctgggcaaggtcctcttgtctcatccctcaaaatcttccagggctctttccctttctccaataaagagaacgcttctggctgataaatgcaaaaacctgcccagaagatgagaaacagcaaagaaccacattgtaaagattctaaaatttgcaactacttctttggttactaaggaagagaaacaattacaggcaggacaaaaataagtataaactatgggaaagatggaagtgcccactgatgataactattgccagatttacaaagcgcaaaccattttctaaaaaacaaaggtcagaagttaccctggacatttaaaagacaataaaaaaaatcacaatacagaaagcaggaatttctaaggaaaatgctgaatcttacccagtgagaccatgttgctgtagttctccaacatcacatctctatataaatccctctgttccaggtccaggcactcccactcctcctgagagaaatctacagccacatccctgaacatcatcaactgttggaaagaataattccaagtattaatggtgaaatttttaaaaataattataatccctatagatgaaaggggaaaggctggaaaggggcactgcagggagtggggcatatattgggcgaaaaactggagttggctgcctgtggtttcaggggaaatgacatgggaataagggtgacaaaagccaagtgtctacatgctctttttttttttttttttttttgagacaagagtctcgctctgtcgcccaggctggagtgcggtggtgcaatctctgatcactgcaagctccgcctcccgggttcacgccattctcctgcctcagcctcccaagtagctgggactacaggcgcccgctaccacgcccggcaaattttttgtattttttagtagagacggggtttctccgtgttagtcaggatggttttgatctcctgaccttgtgatccacccgcctcggcctcccaaagtgctgggattacaggtgtgagccacgacacccagcctacatgctccttttttttgttcttttacgagacagagtgttgctctgtcacccagaccggagtgcagtggtgcaatctcgactcactgcaacctctgcctcccaggttcaagtgattcttgtgccccagccaccctaacagctggggttacgtgtgtgcaccactgcgcctggctaattttttgtatttttagtagagacagggtttcgcaatgttggccaggctggtctcaaattcctgacctcaagtgatccacccaccttggcctcccaaagtcttaatgagccactgcacccggtaaaaactcctgttgctcagttaccacatctttatgatcttcaaatcacaaataccaaaacatcagaatggtagcccagaacagacatcataggagttttttgttgataccactgagaggctacaccagcctggaagaactagccccagatttattatgtgagaaaagttggaggttttgttagttgtaagcagtctttactgggcacaaacagacttgtgcatacagagcctttggcccaggtaactgtcctttgcttaagctactacttttagttgaattatctgttagtttaaactgagagaattctcaagagatacactccctggctgaatattattttctgtggaaaatgtgtagaatctccagactttgttaagcagctgacaatcagcaaattcagtgtcataagtgattactgtgaaagtcatcagatgagttttttgtcgataccactgagaggctataccagcctggaataactagccctggattgttaatgatattaacctttcattaatttcctggaaaatcccagatctctttgaactcaacctcccatcatatctgctaaggaaagcatcacaaagtgccacatacctaaatgaatcccaaccaacaccaactcccatcttgattaaatgaaacatcccattctacagagtaaataaaagcctttatgtagtatgtcccctttaattattctatcccctcttgttaagccacaggtttgaaatgaaaagtctttactgttccccttaaggaaatgtatttctcttcttcagtgctctgccagattgggacacaggagataactgaaagccctggtggatagatttggtcatactggttggagaaaagagggatatctagggaaagcattggactgtttcacagtcattacttatgacactcaatagtgattcaggtaagcagtttaaggataagcaataaaaatattcacatgatttgatataaatgggttatatttttggagagaggcaattccaactcacatgggccatgacttaacattccaagtccaccagtccttctctggattctttcttggtgaggcagcgtgctgggaaagcagagctagaaggaaagaatcacaaggtcaggcctttctcagagctctcaaagggacaaataggaaatgccattttcttccttggaggtaagtcagaaggaacctgaagaaatcctggccctatccaaaaccagagagattcaacaaaagcaggatgaagtttcagtcgaatcacttatgccaaaatcatgatctggatcaggatactactagataagtcaattctggcttgccctaaattcatacatacctacattaacatttatcctcaagccgcctatgaatgtcagttaattgtctcatttaaaacatctggaaatgggtcacttgctcaaattcactattaggaaatatcataggtttgctgaatgcaaagcttgttactttgaatactgtatcctaccctctggatttcagaatttcttattttattgagtgaaggatgagctgggcctttcccttataggagcagcccatgatctctgcctcctgtgttttcattgacagtgagcatcagggtggctttttcatgaagggaacccaaagatggaaggaaggctggattgggcgagtagtcagtgttgtgaagcacgaacttttattaaaaaaatatattggccgggcgtggtggctctcgcctgtaatcccagcactttgggaggcgaggcgggcagatcacgaggtcaggagatgaagaccatcttggccgacatggtgaaaccccgtctctactaaaaatacaaaaattagccaggcatggtggcgcatccctgtaatcccagctattcgggaggctgaggcaggagaatcgcttgaacccaggagttggaggttgcagtgagccgagattgcaccattgcactccagcctggcgacacagcgagactcggtctcaaaaaaaaaaaattatatatagataattttataattatctataattatatatataataaaaattatatatatatatgcctctctgaatctagctttgcacttagcacaagggaatcagataaataagttgcaagacctactatcaaggaattcacagtcagaaaagtaagcagcaattacaatactgtaggaaataaaggtaatcatggttatgaaaggagccaactagttctaaggagcccaaaccaaaactagtttttaacagaaaatttcctataggaaatggtacttcagctgactcttgaggggctgttctgtgtgggaaatgcgcgaggggagaagaaaagacacacaatacctttaagggtaaacaacctttatcccacataaatggcaatgcagatataataagcaaatgatataataagcaaattgcaatgggaagagaagggaaaatatatgtacatacatagatatatatgtgtgttgtgtgtgtatgtgtgtatatatgtgtgtgtgtgtatatatatacacatacacacacacacacacacacacacatatatatatatatatatatatatatatatatatatacacttaccaaactataagcattcaccaccagactgggaagcaacagcctgggctccagagtcagacactacacccagcagactatggaggattcaccaccagaccgggaagcaacagcctgggctccacagtcggccacccatccgtgcacaggcgaggagaggtctcatgaagctttggtgcagtctgggagcttagctctttttgtaacaagttgtttggcatgaggcccagtcacaagggcccttcctgactgggctcaaggaacacaaaaagttcaacctgtttttgcgattgtctattgtttttcaatgactaatgtataggaatagattgaaatagagaattctccgaaacagcactggatgaacgcttcaaggggctcacacaacctgttccaggacttggtgaccattgtttgtgtccatgttcaattgagttcaaatttaatatttaacttttcctccacaggggctcaccagagaagacagggcaaggtgagggggatctcctagcagaggaaacaacatgcgccaatcaagcaaagatatttttgtgcattcaaggaacacagagaggaaagacagtggcagatggagacgtataaagcagggatcctgttatgaaaagccctaaaaaatagggtatagagtttgggccatatttcagaggtaataagaaagcattctgcatttttaaagtaaggtttaaaaatgtttctaattagagatacagcaaagttggtgtgagaggataaagactgatatacataatctgaggagttcatgaaaattccatgtaaagcctgtagtatgaattggtcctaggagacagacagcttcaggggcatagagaactttaagcacttttccaagaagagtgaagggctggagaataaattgtgaactaaaatatattttgtgtttgagaacatgaagtacttgagagtgattattacacggtt[136 bp omitted]catggacaaacctcgtcttaattaaaaatataaaattagccgggcatggtggcacatgcctgtaatcccagctactcaggaggctgaggcaggagaactgcttgaacctgggaggcggaggttgcggtgagctgagatcgtgccattgcactccagcctgggcaacaagagcaaaaccccttctcaaaaaaaaaaaaaaggaaaaaaaaatttttagggacagtgtctcaaactgtcagtcatgctggagtagagtggtgcaatcacagtttactgttgcctcaaactgctaggctgaagcgatccttccacctcagtctgctgaatagggtgggactacaggaatgcaccactgtgcctggctaatttattttatttttgtcgagacggggtccgctatgttgcccaggctgttctcaaactcctggcctcaagaaatactttcccaccttggcctcccaaagtgctggaattacaggtgtaggccaccatgtccagccaaaaactaattctaatcctgatattcctcctcctggaaaccatgtagacagaaacaagaaaatcaaagtaaatcccaaccatcaggaaacagaaaatgaacagattccaaattatttggagatgtgaaaagaaaatgaaagaacaatgtctgtggaagccacagtgatgctacaaagaaaaacaaatgaggaatatccattcccatggggagtagaccatatcctgaatgaaagtttctgtgagcaggaatgatgtcaaaaggaggtggtaaaaggaggcccgaagatgtcagggggattcaaggtggcaaaacacattggttgtattttttttttaaagctttattgaaatataattcacataccatacaattaagccatttacagtgaacaattcaatggttcttagtatattcacaaatacgtgcaaccacagtcaatgttagaatattttcatcatttcgaaaagaaactctaaccctttggctatcactccttggcttccccactgccacatgtgccccatacttagcctcaaataatgactaatctactttctgactctatggattttcctattctggactttcatatgaatggaataacatatgtggacttgttactggcttctttcacgtagcataaggttctcaaggtttatccaaattgtagcatgaatcagtacttcattccttgctatgcctgaataatatctctgcaaatgaatagaccaccttttgtctacccattcgtctattaatggacatttgggttgtttccaccttttgacaattactattatttttgagatgaagtttcgctcttgttgcccaggctggagtgcaatggcacgatctcgactcaccacaacctccacctctggggttcaagtgactctcctgcctcagcctcccgagtagctgggattacaggcatgtaccactatgcccagctaattttgtatttttagtagagacggggtttcttcatgttggtcaggctagtctcaaattcccgacctcaggtgatccgcccgcctcggcctcccaaagtgctgggattacaggcctgagctaccatgcccggctgacaattatttttaaaatgctgcaatgaacattcatgtaaaagtttttgtttgaatatcatctattttgtagttttcagagtataagttttattttctatatagaaaatcatgccatctgcaaatagagatgctcttagctgtgttccgttcttttctccagtgtcttttatttcttttacttccccatttgccctagcccaattgccagtacaatgttaaacagaagtggggatccttgtctggtccctgatcttagagggaagacatccagtcttttaccattaagtgtgatgttggctgtgggtttttcctagatatcaggttgaattcctctttattcctagtttgtagaatgtgtatgttttaaaaaaaatcataaagggtattggctctggtcaaatgccttatctctatctattgagatgattgtgtgatttttgtttttttattctattgatatgatgtatcacattaactgacttttgatggtgagccaaccttgcatttctgggataaatcccactcagtcatgttatataattcattttagatgttactggatttggtttgctactacttgttgaggatttttacacccatattcttatgagatatactttgtctcgtttcagtatctgggaaatactggcctcataaaatgagctggggacttggctgtattccttaattatagtagaagacactgggtgaactcagagctgataataggagtcctcctgaaccagttgagcttctgaatggtaaagaaggcctggctattcaaagggaaccaaattttaaaaaaattgtcttctactggggtaacagaggaagaaacccttgagcaaaaaaaccttaaaaactacccttgccccattcacttttttcacatgaaaataccagtgacagctattccaggaaaatctattacatcctctccaaaatataaa[136 bp omitted]tggtgaaaccctgtctctactaaaaatacaaaaaattagccaggtgtggtggcatgtgcctgtagtgccagctacttgggaggctgaggcaggagaatcacttgaacctgggaggcagaggttccagtgagccaagatcacgccactgcacttcagcctagcaacagagcaagactccatctcaaaacaacaacaacaacaacaacaaaaaacacacaaagttttaaaagtgtgtcaaaatcccccatgtacaaaaaaactcactaaaaaaatcagagaagatgaaaatcatcacccaacatttcagtctgaattaaaaaaaaagtatgatgcaattgcagctctaaaagcagaccacaagcaaaaatatacgatctcaggagagagaagaaagtaatagatagaccatagatgggagttagtggaattcaagactgaaagagaaaataggctaagtcacatcagaaatgaagaataaactagctagtgcagcggcatgtgcctgtggtcccagctacttgggagactgagtctagaagattgcttgagtccaggagttcaaggttgaggccagcctgggcaacacagtgagacccccatctctaggcgcataagatctgacaaatgccacagaaagtatagtatggaacacagaatacagaaattaatgaacagaacaaaatttaacaaagaaacaaaaatcatttgaagaaatgaaaatgaaaagagagatccaatatgcaaaacgcagagcacctaaaaatgaaatccaaattaagaggatatatctaaaacgatggttgtagctgtgtatctaacactacagttttaatactcaagatgaatttcctgaaatagagtataaataaacgtgatgaaaagtgaaaccatattacaggtgaaaatgaaccaaaatagtagcaaaacatgacctaataaaattagactaaaactcatggggaatcaagataaaaatatcaaatataagaaaaaggaaattcaattgtcatcagacttctgcagtgctaaattcagtaccccaaacagtggggtaaatcttccaatatacttgtgaaaaaaacaaatgagggagtcaaaacatttttatatccagccaagctgtcattcgagtataaaggatataaggagttttatgatgcaacttaggaaatactgttgacatgcgctgtttcagaagaagctactagaagacatactccagccacaaaagaacaatagtgaaagtttcagcaaaagaatagtagtgatgctgaacatatttaaatgcaaatctaaataaaatagtaaaagcggaattatggtagccagcatcctggatggccccaaaggtacccagtatgtggtattcacaacactgtgtagctgcctcctatactgaataggattaacttgtatagcaataaggtactgcggaaatgatagagtatgagatagatataaaagacactgtggcttccagcttatgcgttcttgctgtccttttgctctggagaaaaccagttgacgtatcacagggacacttaagaaaccccatggagaggtctacatggtgagaaactgaagtctattgccaatagccatgtgagagccacgttggaaggtgatcctctagtccctgttatgccttcaaatgatagcagccctggccaagagtgtgactgcaacctcaagagaccccaagccagaacttcccagctaagccactcctgaactcctggtccacagaaaatggtgttaagataataaatatttatttctgttttagggtaatatgttttacagcaatagataactaatatagaaatgaaggttagagaatagaaaatagactagctcattgattgcctcatttgtgataactgagagataaagggtgtcatttcaagctgaaaatcaaggggaagaaatttagaaatgtttaggactacagccaaggcaggaggactgccttgaggccaggagtttgaggccagattaagcaaaagaatgagaccttctctaaaaaaaaaaaaaaaatgaatacaaatgtaagtcaaacagggcaaaatgtcaattaaatttcaacatacaagcaaaaagtaggaaatttaaaatgacagcacttagcaggaaaaattcaaattcctataaataaatctaacaatatatgtaacatacaatatcttttgtttgttggtttgtttttgagacagagtctcgctctgtcacccaggctggagtgcagtggcacaatctcggctcactgcaacttccgcctcccgggttcaagtaattctcctgtctcagactcccgagtagctgggactacaggcaccagccatcatgcccagctaatttttgtatttttagtagagacagagtttcaccatattggtcaggctggtctcgaactcctgacctcaggtgatccacctgcctcagcctcccaaagtgctgggaatacaggcatgagccaccgcacctggcctgtacaatgtctttatattaattactacaaatagttaaagaagacctaaacaaatgaaataatttatcacattcatgggatgaaaggctgataattttcaaggtgtcagtttccccaatatagtggtataggaagcttaaaagtaaaaggatagcaaaagatataccatgcaaatcataatcaaaataatgcttaggtggctataatatcaagacaccatagatttcagagcaaataaataacatggaagaaaggatggtcttgaatacatggtgccaggtcaactgaatttatatgaggaaaacaaatcatgatttcccctcacgacacaaaaatcaattccaggtttatatacctacatgtgacagataaatatagatgaaaatacagaatatcttcataccttggggataagcaaagatttgaataagatacagagtacaaaccataaaagaaaaatgataatgatcagactacattttaaaaagcaatttttgttcatcagaaaagagtgaatgggctggtcatggtggcttatgcctgtaattccagcactttggaaggctgaggcgggtggatcatctgaggtcaggagttcgagaccagcctgaccaacatggagaaaccttgtctcttactaaaaatacaaaattagccagacatggtggcgcatgcctgtaatcccagctactcaggaggctgaggcatgataatcacttgaaccggggaggcagagcttgcggtgagccgagatcgcaccattgcattccagcctgggcaacaagagcgaaactccatctcaaaaaaaaaaaaaaaaaaaaaaaagacagtgagtaaaaatgcaaaccttacgctaggagacgatatatacaatacacaaagctgacaagggactcattcagattatacaaagaactcttaaggattaacaatgaaagacaagtttcccaacagctaggctaagaacttgaactggcacttcccaaaggaagatatccaaatggacaatgcacattaaaacaaaggtattcaagttccttagtcatcagttaggaaaaccacaatgcaataccactacatatccaccatattggcaaacattttacagtctgacaatgccatgtgttaacaagaagatggatcaattggaacttgcataaactgttgatgggaacttttaactggttcagccattttggaaaactgacagtatctgcttgaggagattcacatactcttactcaccaattcctctccttggaataacccaatagaaatgcatacatgtaaacacaaaatgacaagtgcaagaatgctctcttcctgattattcatgagaataacgtattgtctgtatatatgataaacttcaataaaaagactaggaagaaatacagcatattacaaggcaaatacaaacaaaaaaataagcagaggccatgatcttgagcatgctaaagcctgcaattcataataaacatataacaatcattaatatctgtatatcaaagcaacaacaactttcataaagcaaaagttacaggttatataaaataaaattttggctgtgcacggtggctcacacctgtaatcccagcactttgggaggccaaggtgggcagatcacaaggtcaggagttcaagaccagcctggccaatgtggtgaaaccacgtgtctactaaaaatacaaaaaaaattagccgggcatgttggcgcatgcctgtagtcccagctactcaggagcctgaggcaggagaattgcttgaaccagaagttgcggtaagccgagatcccaccactgcactccagcctgggcgacagagggagaccccgtctcaaaaaaaataaaataaaataaaataaaatttcattaatacacctctctcaatccaagacaaatcaagtgtaaggcaaaaagtaagtatagactgaccagatgttagatcacaaataaaagttcactaagttccaaagtttaaaaataacacaatatagcaaaactgtaaattatattattggtgaagtggggacctatgtactttactggaagtcttcaacataatcaacagaggttgaggtccccttatgtcacagggatcaagactcctccacaacactgaggccaagacactacaccactgtattagttttctactgccatgaggtagtggcttaaaataatacaaatctattatcatatagttcagtagaagtctgagttgggtcttactaggctaaaatcaaggtgttggtagggctgtgttcctttctggaagctccaggggagaattcgttttcttatgttttccagcttctagaggccaccaacattccttggcttaaggcccacttcctctatctagtaagcaatgtggcatctctctgaccattcttctgcggtcacatctccctctgactttaaactcagccaggaaaggttcactgactttaaggacccatgtcattatattagtccaacaagataatcgcccccatttcaaggttcttaactttatcccctttgcaaagtcctttttgccatataaagtagcatcgtcctagtttccagggattaggaagtaaacattggttgcagggccatcattctgcctaccttgaccccccttctatcttaagcttccttctttctgagagatactcagtgaaggaaataatgtatacagtggtccatttccaagacaaaatgccttgaattggcttaggtaagcaaactacagaagaaacaggatatactaggcccctgcttggatagatgatgcctgcttgtcagcctcccgctttctccctttcccccacttagttgccttcacccaaaccaaagaagtttagtctaagatgaaagtttgctagcctgcaaaatagctcattttgtctgcttttatcagcctgcccagctgcttaggtcataagtcaactattgaagagaccttgagctaactaggattgcagtgcattgtgggccgcaaccaaatgcagcaagacaagcctaaaaaaaaaacacacacacacaccggctgggcgcggtggctcacgcctgtaatcccagcagtttggaaggccgaggcgggcggatcacaaagtcaagagatcgagaccatcctggccgacacggtgaaaccccatctctactaaaaatagaaaagttagctgggcgtggtggcacgcacctgtagtcccagctactcgggaggctgaggcaggagaatccacttgaacctgggaggcggaggttgcagtgagccgtgattgcaccactgcactccagcctggtgacagaacaagactctgtctcacaaaaatcaaaaaacaaaacacctgaagcccctacccaacaatcaataggcaacatccgggaagattgtgaccccatagttatcagcctatgaggaaccaggggaggaacctgtgcactaggggataaattgcttgttgaaactgttgggtgtgcctatcagacactgatcttgcaagaccatcattaaaagtctcacttttgctgttctccgggtctctgagtccattctttgggacgggtaagtttgtttctcacactcaagaaatcatctttcactatcccacgctatctctccaaaactgacttgaatccaaccagaataaatgtcaatccaaccttgtatttatatttatctactataagaagtcccagaatttctagtcaactgtcttttcggacattgtataccatcaagtctcatttgtccccttttctcattcttcccaactttcaacacttttcctgtatgccttcataatggaattcataattcattaacaaccaactcctcttttatcttcaaccacttccttgaacacgccctaacattctgagtctaacagaaactaggctgtatctggaggactctgcagccctctcaacatttccccagctacagcctcttaccagtgggtctgaaaatggaacagatggccggcctccttgttgttcactaccttcagacctttcttcctccctccacaaactctagttttgaatttcctgccatgagattgtatataactcaccacatctcacttttgttgacctctaccaaacacagggtattttccccctatatctgaaatcttcagctcatggtttactctctgcagcgcgattacccttttctattttttttaattcttgcatttttaactacacccacacagatgagccttgtttacttacccttgcctggacttttcccccctctcgtggctcatttccaacaacatgttgatgggtggttgttccccagccgtcttccccagccctctaccccaacctgctgctccatttctctgctctaatttacggagaaactcttgaactatgttgtctacactgtgtcccattcttctcccctccttctaggttgcccccactccaatccagctacgggccagcacaaaaactgctccccacacattcacgaaggactatgcctgtcactcaacgcaaagctcaattctttgtttttggccccatagcggctgctatcaccacctttacgaacgtggtcacgcacaacgcgacgcagtcataatcacgtacatacagtcacatttaaatagtccattagggtcacacacagcgcctgtcaacgtcgtgtgcgcgtgcgcgcacacacacacacacacacacatacacacacacacacacaagctcccgtcgcggccccagctcctgcatcaatttcactctcgcatccactgctcccatcgcgatcgctcgcccccacgctccctcgccggcaaagccaccaactccaaagacattagcacctcactcccctcagccccggcctcgggccctccggagtcattcggcttctgtgtctcggaatcactcacccggccctgcggtcccttgatggtggaaggttccgcgatctttctattaaccctaaagggacagagggctgacaggaagttgcccggggaacggtgcactctgggaaatgtagtccggagcctgggccgtctttaactgccccggacaccgcggtcaccattaacggaccctgcatttgagccccatcccctcgctgggcaaagaccatcgcccacacaccgctcacatctgctgccgagagcttccagaattccaggccgcgtttaggaagcttcagcggaggcatgcaggctgccctacctctgcaaaaggctcccagccctgggaacaggacagtaagcccaggccatcttaggctggaagtaaccttggtcccgacggccctgggaaatgtagtccagagcctggaacactgcagaaatgccccggggggatggtgcgatggttttcagtaggagctcgctgcgtgggcctctgacctatgtggcatggcgggaaagtcctacaagactgtgccaagcgagtggcgagtctgtcccgtctctgcccgagcctcggcccggctgggtggacacctcttgtcccacaagtaccagcctgggatagaacgaaggggaaacgatccatgggacacagctacatgcccagccctataggggtaccctgtctgggaatccatgagaactcttcctaataccttattcccatcctccaatcgcccttaaagtgtttggtttcaattaatgtttatagtaacattagtactgttttgtaaattccattcatgccattctttttgctgaagtacacacttgccagttttcatttgcttctcttttagatgtacatcatttcaatctacatctaaactttctgacagaggagtaatttttttcagtactttcaaacttatcaggtaactaaaatagttgtttctttttttattgtgaaacagaaaatacttgaagtgcataaaatgtgtaagttcagtataactccacacaagtgttggtatctcaagaacaaatgcccattctatgtgatcatttctctttttgtttgtttgtttgttgttttttttgagacagggtctggctttgtcacccaggctggagtacagtggcacgatctaggctctctgcaacctctgcctccctggctcaagtgatcctcccacctcagcctccagaatagctgggactacaggtgtgtgccatcacactcagctaatttttatagagacagggtctcgccatgttggccaggctggtctcgaactcctgggctcaagtgatcctcccaagtaggcctcacaaagtactggcattacaggcatgagtcactgcacataacctgtgtgatcatttctgatacccagctccagctccagctgatct[147 bp omitted]gtaaaaccctgtctctactaataatacaaaaattagctaggtgtggtggtgcatgcctgtaatcccagctactctggaggctgaggcaggagaatcgcttgaacccaggaggcagaggttgcagtgaaccaagatcacaccactgcactccagtctgggcgacaagagcgaaactccatctcaaaaaaagaaaaaaaagttttaatcttgctgtgaaatgtatataaatgcaatcaaattgtacaaattttctgtcttgattagttgttaaactcctaactggattaaccgaaaaccccatagtaaaggccttacagaaggaaaggtatgcccatccagccatcaacatcattttcctggtactactggcaggggaccccaagaccaaccactacacgcccaagctctgatgattcactgggaggctcacagtgaagtgatacaaaagaaaatcagtaaagaaaaaagcgcatggggcaaagtccaggggaaaccaggtgcacactgcgaagggttctttcccagtaaatttatatgggatttatttgttccccagcagtgagttgtgacaatacatgtgagatgttaccaatcagggcagtttattatagattcagtgccctatgtttttattgggggctggtcacataggcagtctgtgcctaacacataccagaatttcaaattcccagaaggaaagcgggtgtttaacataaaccatactgtttgtacaaaaagtttaggcatagtaagccacttattaggaaggtgggaaccaatctgaaattcaagttctagatgcaagccaaagactaacctcgcatatcaggcctttctaaggataagtagtctcagacctgctatgttaactaatttctgctcactactgtcctaaagatgtatggttttcagcaacatcaaattacaagacacatgaaaaggcaagaaaaatcatgacactcaagacataaaagcaaaaagcaacaacaaacaaatagaggtagactcaggtaggatctccccaggagcttgaggctgcagtgaactgtgattgcaccactgcactctagcctgggcaacaaagcaagaccctacctcaaaaattaaaagaaaagaaaaagatatgatgtagatgttggaactatctaaaaaggaatttaaaatattattaatattttcaaagctttaccataatgtttttcaaccagaggtgattttgttctccaggagatatacagcacagtatgaagttcttggtagtcacaactggagaggtacaatttgcatttagaggacagaggtcagggaagctgctaaatacactacaagcacaggatagcttgccacaacaaagaattatccagtcccaaataatggtccaaggttgagatgccctaagtaatcaagacagtgtgtttttggtgaaggacagaaagatagattaatggaaggaacaggctgggcacggtgggtcatgcctgtaatcccagcactgtgggaggccaaggcaggtggatcgcatgaggtcaggagtttgagaccagcctggccaatgtggtgaaaccccatctctactaaaaatacaaaaattagctgggtatggtggctcgtgcctgtaatcccagctactcaggaggctgagacatgagaacctcttcaacctggggaatggaggttgcagtgagctgagatgacaccactgcactccagcctgggcaacagagcaagactccatctcaaaaaatatatatatatatttttaggccaaggcaggcggatcacctaagatcaggagttcaagaccagcctgtccaacatggcgaaatcccatctctactaaaaaatacaaaaattagctggatgtggtaaggcagggagaattgcttgaacccaggaagtggaagttgcagtgagccgagatcacaccactgcactgcagcctggaggacatagcaagactccatctcggggtggggggtggggggaggggagaagttattattatttttttttgtagagacaaggtttcactatgttgccctggctggtctcaaactcctggcctgaagcgcccctcccgcctctgcctcccaaagtgcttggattacaggcatgaaccaccactcctagcctataaaacttttttaggaacacataaaagaaagtgtacatgacctgcagttagatgaagggttcttagacatgacaacaaaagcacaatccataaaagaacaacttgatatactggacttcatagaaaatgtaaacgtctgctattgaagtaacaccgttaaggagaaagacatgggatagattgggagaaaatatttgtaaatcatatatcaggcagaggacttgtatccagaatatatagagaaccttcaaaactcaacaagtaaacaaataacctcaagcttaaaatgtgcaaagggcataaacggaaataaaaagatagataccaggaaaaaatattataaaatgtgcctatatgagatttataaatcactaatttccaccatatataaagtgctcatacatttcaataaaagtgaataatatttctagaatttaaaaaattagtattatagtgagacagacaaaggaaacatagttcatggaaataataagttttaaatatttaaaaaggtattcaccttcatatccaatgaaacaaagttaataatatagtcagaatgaaactataaaagtcactttagggatacaatggagtggcttgcagcaaaccagtattcctgcagaaaactaaaaaatcagatataatacaaaaaaaaaaaacacaaagctttttaac[131 bp omitted]gacaccctgtctctactaaaaatacaaaaaattagctgggcgtagtggcggatgcctgtaatcccagctactcaggaggctgaggcaggagaatcgcttgaacccaggaggtggaggttgcagtgagccaagatcgcaccaccacactccagccctggcaacagtgagactccatctcaaaaaaaaaaaaaaaaaaaagacatgaaggagtgtttgggacaaccaggaatagcgtagtcaagactatagattgtaggtaatcacagacattgtgcagccacatttttcctggattatttgccaattcttggcaaagggcagaaggatccagactgctaggactttagttttctgggcctaaaaacacaacattggagactttatgggccaagatccctgtgagaaaagagggacacagacttgaactctacataaggctggttttcttctcaagacagttacccatttctgaaactggttgggtcaggaggctcaggaacttaggcggaaagcttccaaaaagcagcagagtttttggtagtcttgctggattaagaagacaaagattttgagttcaggccctgtcaggggaaggtgccttggtgaacacaccagatcctcctgaaaccctgatgggctacgtcctaggagcaggcaaaccagaagcacaatgaacctccacaaccgtaatggagccctgactcaactcaatcactgattaaatgaaggtcatcagcccctacttgatctgcccagtaaaggaaaggatgaattctctaaaggaagatattatctgcagcctctactatttttatacaccagtccagaatttaattttaaaaagtattaagcatgccgagacaggactgtatgacagaaaactctgaaaaaacaaacaggtcggccaggcacagtggctcacacctgtaatcccagcactttgggaggccaaggtgggtggatcacctgaggttgggagttcgagaccagcctgacaaatatggagaaaccccgtctctactaaaaatacaaaattagccgggcatggtggcacatgtctgtaatcccagctgctcgggaggctgaggcaggagagttgcttgaacccagaggtggagggtgcagtgagccgagattgcaccattgcactccagccttggcaacaagagcgaaactccatctcaaaaaaaaaaaaaaattaaaaaaaaaaaaaaggccgggcagggtgactgattcctgtaatcccagcactttgggaatgcctgggtggattgcttgagcccaggagtttgagatcagcctgggcaatatggcaaaacctcacctctataaaaaaattagatgggtgtggtgatacatacctgtggtcccagctacttgtgaagctgaggtgggaggatcgtttgagcccaggagattgaggctgcagtgagctgaaaacacaccactgtgctccagcctgagcaataaagcaagaccctgtctcaaaaacaaaacaaaacaaaaaacaaaaaaaaaaaaacccaaaaagcccccaaactccaaacaacaaacaaacaagcaaacaatagaaatagaccaaaatgtgatcctggcattagagtaagtaggcaaggactttttaaaaagatgaaaagatgaaaaattacaccaaagaactagtgtacacattggtatgtataattgaagtcccaaaagaaaagtagagacagcgtggagaagaaccctatttgaagagacaatggcaaggaatttcccaaaaccgattaaacacagcaaccatagattcaagaagttcaccaaaactctgagaaaaaaaatatatataacctagaattctatagtcagtaaaaatctccttcaaaaaagaaaggataaaaagacatttcagacagacca[140 bp omitted]cggtgaaaccccgtctctactaaaaatacaaaaaattagccgggcgtagtggcgggcgcctgtagtcccagctacttgggaggctgaggcaggagaatggcgtgaacccgggaggcggagcttgcagtgagctgagatcccgccactgcactccagcctgggcgacagagcgagactccgtctcaaaaaaaaaaaaaaaaaaaaaaaaaaagaaatactaaatggagtttttcgagaagaacaagatctcagatgaaacagaaagaaatttaggccaggcacagtggctaatactagtaatcccagcaatctgggaggccaaggtggaggttcatttgcatctaggagttcaagaccagcctgagcaatatagcaagactttgcctctacaaaaaatcaaaaattagctgggcgtggtggcgcacacctgcggttccagctactcaggaggctgaggtaggaggatcacttgagcctgggaggtcgaggctgcagtgagccatgatcatgccactgcactcaacctgggtgacagagtccctgtttccaaaaaaaaaaaaaattagtagggaaagaatagcaatagaaagagtaagtatgtgaatataaatgaatattgactgcacaaagtaatatactgccctctggggttttgaatgtatgcagaattaaataacaaaaataaagcaaaaatgaggatggaggtaaatggagttaaagtgtcccaaggtcctctagcagtattggggaaatggtaaagtcaataatttgtcctagactaaaagaaagaggaatgctgtaatctttcaggtaatcactaaaagatttttaaaaacatgtacaacaaattgacagaaaaaatggatccacctttggctttgcagaaaatgacagtgcaatatgacagcacaaagatttataaagaacctagattctttttttttttttgaggggggtggtgggagacggagtttcactcttgttgcccaggctggagtgcaatggcatgatctcggctcactgcaacctctgcctcccgggttcaagcgattctcctgcctcagcctacccagtagctgggattacaggaatgcaccaccacacttggctaatttttgtatttttatcagagacggcgtttcaccatgttggccaggatgatctcgaactcctgacctcaggtgatacgcccatcttggcctcccaaagtgcttggattacaggcatgagccaccacacctggccccaatcttatctttatctggaatatgatatatttcatttacacattcattgtccacttccccaactagaatggtatactctgtgaggacaggaaatcttggctgttctgttcactgatattttcctagtgcctagaatagcacctggcacagataaggagctcaatgaggccaggcgcagtggctcacgcctgtagtcccagcactttgggaggacgatgcgggcagatcacaagatcacgaggtcaggagatcgagaccatcctggctaacacagtgaaaccctgtctctactaaaaatacaaaaattagccgggcatggtggcaggcgcctgcagtcccagctactcgggaggctgaggcagaagaattcttgaacccgggaagcggaggttgcagtgagccgagacagtgccactgcactccagcctgggcgacagagcgagactccgtctcaaaaaaaaaaagagctcaatgaatatctgctgaatgaagaaatacaatggttgacaggaacaggaaataggaactttcatacatttctggttggaataaaaattagttcaccatttgtggaaggtaaatacttacatagcctctgtgttctaactgcatttccttagattctctattagtctatttggcactcgttcatcaagaggccaattatattaactatattttcttattttctgtattcttgatgctctggcatttggggaccttaccaaaaacagggagaggctgctcctctcagggctaattcctaaagataatcacagttttccaatgagcacagcttacatatgcaaaccaaccaatcctgagtctatacctctctgatattgtgatgtaataagaaatatgtattttggtctttatccatgcccatggttcttggttcatgggtcctaaaacccttgtagtttcctaaacagagtattttctgttaaaacacttgttcttagccaagtgcggtggctcacacctgtaatcccagcactttgagaggccaaggcaggcagatcatgaggttaggagttcaagaccagcctggccaacatggtgaaaccctgtctttactaaaaatacaaaaattagccgggtgtggtggcgcacatctgtaatcccagctactcgggaggctgaggcagaattgcttgaacccgggaggcagtggttgcagtgagccgagattgcgccactgcactccagcctgggcaatacagtaagactttgtcttgggaaaaaaaacaaaacaaaaaacaaaacaaaaacacttgttcttttgtccttggttatgttctgaatgtgttccccaaaatt[131 bp omitted]catggtgaaaccccgtctctactaaaaatacaaaaattagccgggattggtggcatgtgcctgtaatcccagctacttgggagactgagacaggagaatcacttgaactggggagatggaggttgcagtgagccaagatcacgtcattacactccagcctgggcgacaaagagagactctgtctcaaaaaaaaaaaaaagaagtggagcccttaggaggtgattaaattatgagggaagagcctacatagatggaattagtgctttcaaaaaaaggattgagggaatgggtccagcccttcagtaccttctgacatgtggggacacagcattcctgccctgtggaggatgcagcagcaaggtcccatcttggaatcagagagcagacctaccagacacctatcctgctggcatctcaatcttgaacttcccagcctccagaactgtgggaaataattttctattatttacaaattacttttcaggtattttgcttctcaggtattttgctgtagaagtactaagggactaagacacttcagttcctgaaatagcaccagagtaataaatgtgaaagatgtctttactgttcattaaccaacccctttcaaccacaagtgagttaatgaggtgaagttagtaaagcccctacataaccacaggatagggcaaccaaacatgtgattagaatgttggaaagttctgccctaccccatgacttctgggaaaaggaaaagggctgaaggttgaactcatcaccaatcgctgctgatttaattaatcatgcctacataatgaagccttcatagaaacacaaagggctgagttcaaacagcttatttcccggactaccccacaggcgttttcttttttctgttttttaggagacattggtggggtaaacatacaaaaatgtgattgcctcactcaaccaagagccttagccataattaaaagatgttcagatggagctgtacaggaatgtgatgctggagaactagagcaacagagccacattaggtatagatcgcttgcctgtatagtccaaattttgttgtttttgttttttgggtctttttgtttgtttgtttgttgtattttgttttgttttaaggagcggagagtttaataggcaagaaggaagggagaagacagaaggaagaagttcccccatacagagatgggggttgggggggtggtggctccaaagccgaaagaggaggtccccttgttttttgggggttttttgagacggagtctcactctgtcatccaggctggagtgcagtggtgcgatctcagttcactgcaacctctgtctgccgggttcaagccattctcctgcgtcagcctccaaagtagctgggattacaggtgcacaccaccacgcccagctaattttgtatttttagtagagacggggtttcaccatatt[137 bp omitted]caggctggtctcaaactcctgagctcaagtgatcctcctgcctcagccttccaaagtgctgagatcacaggcatgaaccaccatgcccggcccttcctgccattgttaaaagcttcaggattatattttacatcagcatttcctgttgtcatacacttcctgccatcatatttcggcaacctctaccacctcccaaagtttctagcttaaaaaattattgatttcctcctagctcccctttctgtcagttttttaattttatatttgttttcaaatgagtcctcacattgattttaaaaatttaacaagagtatagtgaaaaggaagttcccctttcactatttatcttccccatatgcatctattatgacgggtttcttttttaaactacttggagtactcataactgattttgtactctagttcagaagaaatgtctgaatgttaaatgtttacataaaaaatgctattttattatatcagtaatggagcttcccccctttaaaactgctgcaccaggaagatacaaccttgttatcacaatttaaagagaaaatgagacttggaggttcagattcctccacagtcatagtatcagctacccacgcagtgacccacattcaggtgattacacacactcatacacagatccatacacgatcttgccccccccacctccacacactcaatatgacctccccacgcccaaagctgcacacatcttgacctcacttctctcacacacacaccaatctgacccgcacgcggtttctttcactcaactacccagacacccctcatcccaccagcacaagcaggcccaccgcggtctcacacacactcgagccttcctttgcccagtctcacatgcatgactgggatcgcggatttgtccccttccgactccccatgctggttcggtcccagacgctcaggtgccacattggggtgcgctctcccggctcctccacacgctacgcagctgcccgcctcaagagcgtctgcgtgcttccagcgttaagtggaattccaagcagcctccggggcacagttagtctggtcactgcggccagactgccgcctcaggacccagagaacgcagcacactttagttgggcccatctatccccggcgaggcttggactacgtttcccaggagaccctgcggtccagtatgtctcccgaggaggggcggaagcccgggagccgccctctgaggctgggcggggtgaaagaaagcttgccccagaggacttaaacaggcaagaaggacttggttaaagactattgcaatagtcaacttccaatacaacagcagctggagatttatagctaacgggctgggtgaaggagttaaaggatgctaaattactaagaggaagttaagtatcaagagtggggggattgttactaaactggcttagctggattcttgctgaagtgctgttcgcaggctatggaggaggcctggccaagcaaaaagggctcagaggagcctgactaaagcttggtctagggactccttgtcaggtgagactcccggaaggctccgatgggcagctcacctcaaagagatagttttgttggtgccagagtccgcgccaggggaatcgggatggctgggctgtagctttcggcaacctgtcgctttctggactacacttcccagaagcctctaggcccagggcactctcccgcgataactagattgtctcttgaggagtgggcgggatcttcccgcggatttgggcaagcggccttggggctttgtgagatagctagggtcgacttgtgtggattctagtagaacggagctgaccctatccgaacaggcgtaagtgaggcggctcggagcctggcgcgacaggaactcccgacctgtgtgggctgcgtggggaacaggctaaggagcgattgtgaggagtgtgtacggttgtgactgggggcgtgtgtctgtgcgaccgtgtatggaactgtgagggcggggaggaggactttttgtttatgtttgtgcgggtgtgagtagagtttaattgtgaccgggttgggcactgtgtttgcgagtgtgaggttcctggaccgcggttgtgactgtatgtccccttggggtgtgtgtgtgtgtgtttactaccatttgccgaactgtgtgtagtatgccttaattttgaggtttgtggctgcttccgtgtgtgtgtgtgcgcgcgcgttggtgatattgttgatggagggtgcgtgtgaatttgttgtcattgtgaccccaaggtgtatgtcactgggaatttgagagatgcccacggactctgtggttgtgtccgtgtctacccccgtggtgtgtatgagtgtgtgattgtgtgttgtgtttaggtttggggtgcctgtgacgtttatgtccctgcggtgtgagtgagtttgtgtgactatgtgtccgtatagccaatgtaggtatggggagtctttgtctttgtgacttcagccattggagacccctgtgagctcagggacaggttctgcccagaacggcattgaccctaccgttgtctgtgatgcccggattaagcaggatgccctagacttctctgaccttcctctgtaggtgatgggcagtaggggctgagcaaagataacttctgacatagtcaaaccaactccctctcagaagaacctgatgtttcctgactgctttctccttcctcagccctgccctgcttggatagaggcctccgaacaggagtaaagaatggctgttgaacatccacaaggcacctgcaaggtagcttgtcctgtcctcttgtttaagaaaaatccctttttctttgtcaggacatagttgctttccttctcttgaaaattcttgcctatgagatgacctgatccctggagtttccattttgagaaaatgtggtgtcttcaaaccccacctcccacacctgattttcccttactgatttgtcagatggttttaatttttctttttcttttttttttctttctttctttttttttttttttttttgagacagaattacaggcgtgagctgctgtgcccggccttatccttctactcttgatggacatttgtcttgtaatttttggctactacaggcagtgtgactatgatcattttgtgcgcatattttggtacacatttgcttgcatttctttagaatatatacctagtgattaaattgctgatagtggctggatgcagtggctcatgcctgtaatcccagcactttggggggccaaggcgggcggatcacgaggtcaagagatcaagatcatcctggccaacatgaggaaaccccgtctctactaaaaacacaaaaattagctgggcgtggtggcacgcgcctgtagtcccagctacttgggaggctgaggagaatcgcttgaacccgggaggcagaggttgcagtgagccaagattgtgccactgccctccagcctggtgacagagtgagactccatctcaaaaaaaaaaaaaaaaagtgctaataggtagggtttgtacatcttcagttttaccaaacattgccaaactgttctctaaagatactgtacttatgccagcagtttacaagagttttcttagctccacatccatgctagacatcataaaactcttaaatttttgccaatctggtgggtgtctaatgttatatttaatttaaatttcctttattgctaataaagttgagcattgattcttggccatttgaatgtccccttttttgttttttttgttttttttttttgagactgagtctctattgcccaggctggagtgcagttgaatgtccccttttataaggtgttgttcaaatatttgaccaatttttaattgggtttttctctgatttacggcagttgtacatatgtgtatatatcttctgtaaattaatcttttttcagttgtatgtgtgataagtattttcacctgctctggtttgacttttcactctatgtggtgccttttgacaaatagaagttctggatttcattgtaataaaatcatttcctatggttagtcttgtttaagaaatttttgtctacctcaagataatgaagattttctttggtcttaaagccaaaagcttgctttctttctttcttttttttttttttttttttgactcgaagtttcgctcttattgcccaggctggagtgcaatggcatgatctcggctcaccacaacctccgcctcttgggttcaagtgattgtcctgcctcagcctcccaagtagctgggattacaggcatgcaccaccatacctggctaattttgtatttttagtagagacagggtttctccatgttggtcaggctggcctggaactaggtgatctgcctacctcagccttccaaagtgctgggattacaggcataagccaccgcacctggccaagccgaaagctttctagggtaggctttaatgtttaggtctttacaccacctggaatttttatagggtaggattgaatttcatttttctcccgagtgtgtatccagttattatagtatcatttattggaaagttcatattttctgcactgatatgcagtgccattttagtaaaaaaatcaagtgaacatatatgtctatgtctatttctggattctgttccactggtctatttgtcactcctcgcagtaataacatactgtcttactcactgtaactttgtatttggagcaagtacacttaccttctttttcctcaagagtgtcttggctatttgtgtttctttgtattttcgtgtcaattgttgaattagcttggttccacccaaacatctcttggaattttgatgaaattgcatggtacgtataattttttgagtagaaatttggaaactcttctacacttgatctgagccaaaaggccaagagacaatgggggactcttctaataacatgagcctctcagtggatgtaggtcttagtgtttctcaacaaggtcttgtttatctcctataaatagttctagacaagtaggaatcacgtaattcgttgtacagagtattcctttggcattgactgtctggaatctgagcagttcagataatgatcaatcatagtgataattttagcctgggttttgtttttttttttttttattgagcacctatctcctcctgcctgtccttgtccccctcctccacctcttcctcctcctcaaaaagcagctgtattagaaagactaaaatgtatggtaacttgaacagctaggttgtacaagaaaggaattgaaaattccctttctgatgtcttccaaaacttgaatttcatttaaatgcaccttattctttcctcagacctctaacttcaccctggagttgagcagaaacatggcttgccttttccctcagatcagtcttggactccagacaaagggttggaactttgagccaataagcaggttactggtaacagtgcctgaggaaagacaaagctatgggtgtaaggttctttatatacggtatcctcccactcctatcttctccagctctttatgtactaatataatttttaacattttcttttattcttggccttctcaaatacgtttttggaagtggggatatgaaaattagatttagatgtaaatgtagatatttattgtctaatattttttatgttagtaacatctggtacaatcaagcctgctttttcgttatcttttactcttctcacttatcagatttcttttttttcttttcttttctttttttttttttggatggagtctctctctgttgcccaggctggagtgcagtggtgcaatctcgggtcactgtaagctccacctcctgggtttgccattctcctgcctcagcctcccaagtagctgagactacacgcacccgccaccatgcccagctaattttttgtatttttagtagagacggggtttc[141 bp omitted]ggagtgcagtggcgccatctcagctcactgcaagctccgcctcccgggttcacgccattctcctgcctcagcctcccaagtagctgggactacaggcccccgccaccacgcccagctaatgttttgttttttgtatttttagtagagacggggtttcacg[138 bp omitted]ttgttgcccaggctggagtgcaatgatgtgatctcggttcatcacaacctctgtctcctgttcaagtgattctcctgcttcagcctcccgagtagctgggattacaggcatgtgccaccacgcctggctaattttgtatttttagtagagacagggatccttcctgttggtcaggctggtctcgaactcctgacctcaggtgatacactcacctcggcctcacaaagtgttgggattacaggcgtgagccaccgcacccggcccatgtttctttttaactacgcttttctcttcccgacctatcacctccactgtgctgtgtgaggtaatttctgcctctacatctttgccatcttttcttaccaactctttagttcacatattgtcttcattgggaaaaaagtcatctcagattattttacccacactagccttatctctctgtaatacgacataaagagcgtgaccttaagtatcagaaaaatgtggcatctgatttcacccataccacttgtgagtttaacctgtgaagaagagataataattttctgtcagtgtcgtcaagattgaaataacttatgtgcacaacacttaatacacatcaggtgttgagaaaatgttatttcccttctttacttttctttcttgggacctctatatcaattacagtagaaagcatttaactaaatgcctttggtttttcccaaaatatcttatatgtaagttttgctccctacctacattgtaaatcatttagaaccaggattgtgactttccgttctcttatatataacttttcaatccattttaaatttgttttgctttgatttggggatctaaattcaattttttctcatttacctggtcttattcccatattatttattcagtgataacttatttgcttttctcttactttgtactgcctacttggtgatattataagtaattcgtattatatatttgaattttttttcagttctttgatttatgtctctgtgcttccgcctgaaccatgtttagattttctttcaaaaacctttgaatacatgatcagatgtgtcacttcttaagattgttgtatttggccaggccagtggctcatgcctgtaatactagcacattgggaggccgaggcaggcgcatcacctgaggtcaggaatttgagaccagcctggacaacacggtgaaaccccatttctattaaaaatacaaaaattagccgggcatggtggcaggtacctgtaattccagctacctgggaggcaggagaatcgctggaacccgggaggcagagactgcagtgagccaagatggtgccactgcactccagcctgggtgacagaacgagactccgtctcaaaaaaaaaaaaaaaagattgctgtattctttattttcattacaaaaagaattccttattacaacacatttagaaaatagaaggataaagaaaaaacaaaggtcatctgtaatcctatcaattagatataactaccatcaaattgttacagcaaatacttagaattctttttttaatgcaatcgttgtgtagctattgatctgtgtaacctgtgtttattatgccaaaatacatatcaacagctgtccatgttaacatttatctttatcacgaattgtaatggcctcatagagttatttcaccaaggcttttttgttgaatatagtttgcttacaaattattggctttataaataaccatctactttggccaaatgctagtgcttgtttttttccttttcagtaaaattataattatatacataattaatgaatatatttttcttataaaaattgtttatttatttatttattttgagacggagtcttgctctgtcgcccaggctggagtgcagcggcgccatcttggctcactgcaagctccgcctcctgggttcacgccattctcctgcctcagcctcccgagtagctgggactacaggcgcccgccaccacgcccagctaatttttttgtatttttagcagagacggggtttctc[140 bp omitted]acttcacagtacactcagttgtctctaacagaatctgcttttctaactgccagttaggtcacttatagctgcataaggtacaaaatagcacttagaacaaataatgatttcatttcatttaagctattctttttttgtttgtttgcttgagactaggttttgctcttgtcaccccggctggagtgcaatggcacgatcttggctcactgcaacctccacttcctgggttcaagcaattctgcctcagcctcccaagtagctgggattacaggctcctggcacaacacctggctaatttttttttgtatatttagtggagatggggtttcaccatgttgtccaggctggtctcaaactcctgacctcaggtgatccgcccacctaggcctcccaaagtgctgggattacaggcatgagccactgcgcctggcctaagctagctattcttaaccttggttactaacctctggtcccaccctcagcaattctgatttaattggtctggggtatggcctgagcatcgccatttttctcattattgttttaagactaatcaagcccatttttcttattattgttttaagactaatcaagcaaagcagtgagaatggagaaggaacaaagaaatctgtaactggttgtgatcaattagttgtaaacaccacttgcacttggactagccaatcacaatttttaaaaggtcaccagatgactctatgcactgccacaattgagaactggtgacttcagcgcatataagctgatagaaaagcattaaaatttaatttgatgcggagtgggttcaaactttggaatatttaaaaaactacccaagaggcagggtgcagtggctcacgcccgtaatcccagcactttaggaggaaggcgggcggcggatcacctgaggtcgggagttcgagaccagcctggccaacatggtgaaaccccgtctctaccaaaaatagaaaaattagctgggtgtggtggtgggcacctgtagtcccagctactcgggaggctgaggcatgagaccccttgaacctgggaggtggaggttgcagggagccaagattgcaccactgcactccagcctaggcgacagagtaagatgctgtctcaaaaaataaaaatcaaaataaaaaataaaaagctacccaagtgattctaatgtacactcaggaatgagaatcactgagttagacaatcgtgatttgttttatggagctgagcacagtaactggaagaaaaatcaaagtcatgtatcaaggaagtagcggaaggagtagttttggcagaggcaatcaacaatatctgccatatctgtgcacttcctagcaatttattgtatgaaaatacactggtcatcttagtggtgtcttgtgggagagaaaacctaaagtatatggtacatacacataccacgtttaatcagcagtcttctttttaaaaaaaaaaaaaaactttcaaaagctttgggttttgtaaatcttaaacttttttatggttttttttttgttgttgttgacagcctgacagttgctcaggctggagtataggagtgcagtggcatgatctcagctcactgcagcctctgcctccccaggttcaagtgattctcctgcctcagcctcttgagtagctgagattacaggcatgcaccgccacacccagctaatatttgtatttttagtagagatggggttttgc[141 bp omitted]tttttttaattttgagattctttttttgtgacattgaattcaaatctgttttatattatttttatacaggcatttaattctatcaattactttttatttggtaatttcttgatgtccagtttttgatatgtatcttgctcttgtttacctcgtttctaggctgtttgtatttccatttagtttcatatttaacataagaattatttaggaatatgttttgttaactttaaaatttttattaaatttgaaacttgtagaagttaaaagaatagcataaagtattcctgtgtaccactcagattcaccagttgttaccttttgcctatttgcgttatcattctcatatgaacttgttttcttctctctctccctctctctctctgcacacacacacacacacacacagacacaccctacacacattttatctgtaccatttaagactaagttgcagatttttttgtttgtttgtttgtttttttgagacagtctcgctgggtcgcccaggctggagtgcaggggcgtgatctcggctcactgcaagtgccgcctcctgggtacactccattctcctgcctcagcctcccgagtagctggaactacaggcgcacgccaccacacccggctaattttttgtatttttagtagagatggggtttcaccgtgttagccagaatggtctcaatctcctgacctcgtgatccgcctgccttggcctcccaaagtgctgggattacaggcatgagccaccgcgtccagctaagttgcagatattttgcccctttatttcctaacaacaagattattctcttacataacccacagtacagttattaaaattttaacatttatatgatactctaatccatatttaaaatttttgattcatcccagtaatgttctttataacaaaccaccctaccctttctcctcatctatccaggatccactttaaaatcacactttaaatttactaattatgtctctctagtcttctttaatctggaagagttgctctctctttgtctttcatgatcttggaatttttgaagaggagaagccatttattttgtaaaaagtcccttaatttgggtttgtcttctggttcttcatgcttacattcaggctatgaattttgtggcaggaataccataaaggtaatattgtatccttcttgctgcatcatctcaggagatacatgattttgatttattccatttctggagatgttaactttgataatttgttaaggggatatctaccatgtttctccactgtaatattgacagttgtctatttgtaattaatagataatttgtggagatgtactttgtaactgtgtaaataactactcaccaaacttttccccactagtttaacatccatccactgataattattcttgggtctgttattagtaagatgtaatagtaataatgggagggttttttttttgtttgatttctatcgccattattttgtctgtattaattggttggcattctactataaagaagagctttcccttctctcccacttattcgtttatgtcaatatgaattcatagatgtttactttcctcaatgggttataatctgttgttatttatttttatactcaagttgtcccagatttggccagcaggaacccattctggctggcttctgtgttcctttgacttgtctccatgattctttgagcatttccttacttcctggaatgataagatgttccaggctcattcctaaatactgtcttagctccagcctggaatgaatcatttctctaaagagctctggttccttgcaatgtgaatatttggaaaccaatatctaggtgatgggactgcagtgttcattcttgtcacaacctgttccatatttatatcttccttctgtagtagtaagaaacctggcttccattatcctcattagatttacgaatttgttcaagtctagaatttatacatacagaatgtgagaatgctaacctatactgtggtaaaaatcaagaatactaagtagggttcagtatttgcttatagttctctttatctttttatttttatttatttatttatttttgagacggagtctcgctctatcaccaggctgaagtgcagtggcgtgatctccgctcactgcaacctctgtctcctgggttcaagtgatcctcttgcctgagcctcccaagtagctgggactacaggtgtgcaccaccacgcccagcaaattttttgtatttttagtagagactggttttcagcatgttggccaggatggtcttgatctcttgagcttgcaatccgccagcctcagcctcccaaagtgctgggattataggcatgagccaccatgcccagcctttttttttttttttttcttgagatggtgtcttgccctgtcacccaggctgcagtgcagtggcatgacctcggctcactgtaacctctgcctccctgttccagtgattcttctgcctcagcttcctgagtagctggaattacaggtgtccaccaccacacctggctaatttttgtatttttagtagagacggggtttctc[131 bp omitted]gtaatcaaaatattgtgttctaatttacttggatttggttttttcccccattaaagttgcttttgttattcatttgaaatacatttaagtttgttagttcctaccgtttggccttttttattactctgttcttggtgacttgattgtatgagtatgtaaaaatattagcatgctaccaaaagttaaaactagctgggtgtggtggctcacacctgtaatcccagcactttgggaggctgaggcaggtggatcacttgaggccgggagttcaagaccagcctgggcaacacagggaaaccccgtctctaccaaaaaatacaaaaattagccaggagtggtggtgcacacctgtaggcccagccacttgggaagctgaagcaggagaatcacttgaacctgggaggcagaggttgcagtgagccaagatcatgccactgcattccaacctgggcgacagagtgagacccagtctcaaaaaaaaaaaaaaaaaaaaaaaagttaaaactatgcaaaaaggtaaagttagagcatcatcactctgctcccacaacccttgttttggtgcgtgttaatgggctcaattgtgtcccttccaaaattcatatcttgaaagcctaaaccccagcgccttagaatgtgaatgtatttggaaacagggcctttaattcagttaaaatgaggccattaaggtgagtactcattcgacctgactcctatctttataagggaggaaatttggacacacagagagatgccaaggatacacacagaggaaagaccatgtgagtgcatagcaagaaagtgaccatctgcaagccaaggtgagaggcctcagaagaaaccaaacccgcaatcagcataatcttggactgatgtccataactgtgaacaaacaaatttctgttatttaaaccatccagtcagtggtattttattatggcagccctagcaaactaatacggtgagttatttcctcctgggtcatactatatacttgtctctctgggttatgctgagattggaccctcattataggtctataatgaggattgagcatttccttacttcctggaatgagaagatgttccaggctcattcctaaatactgtcttaacagacaacatttctggtggatcttaaagagaatgagcatgccctttgcactactccagatgatgttatcatagggttttcaaccagaggaaaactagtttctcaaatgctggattgcaagttatttccactagtaagagagatccccacagtgatttaggagttcaagattgccagtttcatctgggtcccatccgtatgtcccaactccaaatttcaggttcctattctttgccattcttctttcacatgaaaaatgtggcaagactgtgaattcaacattcatcataattcagcaagctgagcagttctgtgtttttcagcaatgtcagccctttggctacaagaaaggggagattcttttaggatttttatggaaatgctctcattctcagattgtgacttgaactgagagttaataaacctgggcttatcagcttctctttatgcatttaagttaacataagttaatccatcccacaccgcagtccttatatcattactgccataatggtcaagtacagcaactatttagctcccaaggcatgtgctttaattgacacttcattccaatcaaccatggcctaattaattgtaacattactgcatgccattaatttctaccaacccaaatcccattggcatggaactctgcactgcagtcaatcccaaaggattagcaaaaagatactaaaaggcatgaccaaactaatcccaaagttccatctttacaggcctttcacttggaacgacatcagttaccaattctgttgcagtcaatatctaatcaaggaacagaaaacacagcaatttgaactaggaaagtttaatataaaaaattattaaccatcgtggaactagagtaacaaaggattgaccagtaagaagtaaaggaaactctaaaaaccatgggaattacagccataaagagcagccattgatcgggcatgatgcctcacatctgtaatcccaacacttggggaagctgaggtgggaggataacttaaagccaggaatttcagaccagatcctgtctctacaaaaagaaaaataaaacagccaattagccaggtgtggtgcatgtgcctgtattcctagctacttgggaggctgaggtgggaggatggcttcagcctaagagtttgaggctgcagtgagctatgattgtgcctgggtacctgggtgactccagcctgggtgacagagtgagaccttgtctctaaaaaatttaaaaaaaaaataataagagcagccactactaatggtagagagtccgaggaagacgccctcccagggttaacatccagcccttgttggagagtgcacatccgtggctcattgaatgacagtaattgctgtggtaaagggctgggactaagatgaggcaagtgagacggtgagaagcactcaccgtcagatgtaactacacttggatgaccctgagacggaatgcctcaaattttgcaccctgggttcctcattcttaagacagtcatcgtcagggttatacgtgcagggttggcatctgagagtgaaagcctcaagttttgtgccataagtgcctcacttgccttagccatgtcctgttcctgctgtggaacttgctggaaatctgtgctctagaatttgccaggaatccatcctgtgtggcagactgggttgtcttaccagaagcatttgctacaaaactttcagacaaggctactgggtgctgctggccactttgtactttaagagccgggagctagagaagctgcttgactgaggaagcctggtaaagtcacccatgctgcaggaactgggtgctcgggaaactgaatgtgctgcaggaggtggacctggattctggagccgcctgccagcaagcatgccagaaccagaaaggaacgccccttcctcctgcagtgtctttcagacatccactactggcaaagcttaacattgttctggcaaggaaaaatatttctatagcccaggtctgcttttgcagagtgaaaaaatggtgaataaagggtgaatttggaacttaggggcaatacattgataactagcacatagtcttctaagagttttaaagttaattttttaaaatgtaagtcatttatctaagactgactttgctgtgagatagggatataatacttttcaaaatttttatttatttatttattgatagagacagagtctcactctgtcacacatgctggagtgtagtagttcgatctcggctcactgcaacctccacctcccaggttcacgtgattctcctgcctcagtctcccgagtagctgggactatagatatgtgccaccacgcccagctactttttgtatagtacttttttaaatggatagatgattatatcttttgaatttttccatataggcaatcataagatctgcaaacatcacttttgtttcttgctttctagtacttacatgttttatttgctacagcctttacggacatgcacatatttgacgtgtcccttcctggtttttgtaggtgctgttcatcagaatgaggaaattaccttccactcatagcttgttcaagttttgtgtttcttcttacagtaactggatgttgggttttatcaaattctctgattgttgtagacaattgtgcatttttctctctattctgttaatataattaattaactgatttttcagtgttgaagcaaccttgtattccttggataaaatcaacttattcataaagtttgcttttttaattattttattcagtttgctagagttttatttagggtgtgtgtgtgtgttcataaattatattagcccaaaattattctctcttcatatttagtattttgtcttatttggtatcatggctgttagactactttcatcagataaactgaaaaatgttctttctgtttcttttttcttcttttcccctcaaagtttgaggtttttcctgaaatattttatatattcaaatacataaaatctttttaggttaagtgataatacccatataaccaccatgaagattggaaaaatacaacattgctaataccacaaagccatctgcctgcccaaaccaaattaatctctttcgctctccactgaagtgtaactattaagtagattttgtaaaaatcattctctgctattataattttttgccaactttgtataactccctaaagaatattatacagctttgcctgcttttaaacttatgtaaattgaataataatatatgtgttcttttaagttttgttttgttttgtcttttttgagacagtctcactctgttgcccacgctagagtgtaatggcataatctcgtctcactgcaacctccacctcccgattcaagtgattctcctgcctcagcctcccaagtagctgggattacaggcgtgcaccaccaagcctagctaattttttgtattttttagtagagacggggtttcactgtgttggccaggctggtctcaaactcctgacctcaagcgatccacttgcctcggccttccaaagtgctagtattacaggcgtgagccgccgcacctggcccatgttgaatagtttagatatatcttgtttatctccactattatttaataacctttatgactatatcacagtgtattttgtccaacatattttttatgtggataattggtggtttccagcattttactcttaataaaactgttatgaacattgtagtggatgttttacctaggagtggaattgctgggtaatagggaatgtgcatgtgttagcctagataaccaaactctttcaaagtggttgtatgaaaaagtggtctacttccaacagtgtatatttgccgccgcctttgccacgtttttcccacatctttaccaacatttggaatagtcacactttttacctacctagtatacttagtaatatctaattatggtgttaatttgtatgaccatgactactgatgaaacagaacatcttttcatttgtattatcttttatctccttttctcattttttccccaagatttgttcttttaggcaaaattcacatgagatacacttaaccattttaaagtgtataattcagtggtatttagtataaattcagtggtatttgctgtattcacaatattgtgcaactattgattctctctagttttaaacctttttcatctgcctctagaaataccctgtacccaattgaagcacaaacttttaacttggatgaatttaaattgatgtattcttttctttcattgcttgtgctttaggtgttaaatttaagaattaattgccaaatctgaggtcatgaagaattagaaattctgtttttttgaaagaattttatgatttagcacttctgtttaggttgttgatccatcttgagctcacattttatatttgcatgtgtttatccagttgtcccaataccatttgttgaagagacatttctttctccattcagtggacttactatccttctgggaaatctattagtcatagatgtttgggtttatttctggattttcagttttattccattagtttacaagtctgttcttaggccagtcctattgattactgtagctttgtagtagtaagttttacaattgtaagaagagagtcctaccttttcattttcaatacacattgcagttccatatggattttgggtaccaattgcagttccatatggatatgaggagtggcttttttttttttttttttgagtcagagtcttgctgtgtcgcccaggctagagtgcagtggtgaaatctctgctcactgcaacctctgcttcctgcgttccaaaaattctcctgcctcaggctcccgagtagctgggattacaggtgcgtgccaccacgcccagctaattttttttacttttagtagagacagggttttacca[140 bp omitted]caataccattttttgaagagacatttctttctccattcagtggacttaactggccttctgggaaatctattagtcatagatgtttgggtttatttctggattttcagttttattccattagtttacaaggctgttcttaggccagtccttttgattactgtagctttataatagtaagttttacaattggaagaagtgagtcctactttttcattttcaatacacattacagttccatatgattttgggtacccattgcagttccacatggatatgaggagtggctttttttttttttttgagatggagtcttgctctgttgcccaggctggagtgcagtggtggagctcggctcactgcaacctccgcttcctgggttctaacaattctcctgcctcaggctcccgagtagctgggattacaggtgcgtgccaccacgcccagctaatttttttacttttagtagagacagggtttcaccatgttggccaagctagtctcaaactcctgacctcgtgatccacccgcctcagcctcccaaactgctgggattaccgccccgcctggcttttcatttcaaaggccactgaagtgttaatagagattgtattgaatctgcagattattttagcgagtattgccatcttcatgttaagtcttctaatccatgaacatgggattttaatctatttaatctccaactgatgtactgcaattcagttctggtactagctgcccagagttagtgtcagactccataggttttagcatacagtccccagtaaatctgcccttactttaggccaactagctacaattccaggaagttcccatgactccctccccctccccccttcatttagtaatttactacaactcacagaattcaggaaagcactacacttaaaattatagttttattatgaaagataaggatacaaattaggaacagcacagtaaagagacacatagagcaaggtctgaaagggacctatacacagtttctatgccctttcctggtgaaagcagggtgtgtcaccctccaaacacattgatatgttcaccagtaaggaagccccactgaactttggggtggaatttcattatgtaggcatgattgattaatcattggccacatgactgaactcagtctccagccccactttcttcctcagagactggctagctaaaagtatttttgatgactgccccaattctgaagctactcgggtccaccatgagttacctcattagcataaactcaggtgtgatccatagcaaagacatgtctagctctgtgctaggaaccctaggacaaagacctgacaaattattacacagggcataaacaagaccaggagtgaatatggcagtgttttcttatttatttagtggtttcttttctcttggatcatttagctttttttttttttttgagactgagtcttgctctgtcgccccggctggaatgcagtagcgtgatctcggctcactgcaagctctacctcctgggttcaagcagttctcctgcctcagcatcccaagtagctgggattacaggcacatgccaccacgcctggtgtgccaccatgcctgactaactgttttgtatttttaatagagacagggtttcaccatgtgggccaggctggtttcgaactcctgacctcaagtgagccgcccaccttggcctcccaaagtgctgggattacagacttgagccactgcacccagcccatttagttttttattaatgatttgagaaagatcttatattttacctgctagttctttgacagttaaatgttttgtaaatatcatcacccattctgtggcttgcgtctttttaacagattttattcataagtgagctgtgaatcacgcttatatttttacgcaactttgttttccatttaattactattacctttttgtccatatatttatcactaatttatattcaaaatctactggaaaataaatctttttccagtatgttctgtcagtttcttgggtttagagacatctcttctatgatcctttttttctctactgactgcttgtaccactattactctagaattctatctttttaaattcactgcccttctgcgttgagttctttgtttcttggattccttgccttcctgtttcttggtttggttcttcttgatattggtggcatgtgagaaaggatgaatgagaattaaattttgtgagttctggtatatttttcaaccactatattgattctttggcagggcatggaattctacattaaaaatatttttcctcagaattttaaaattatgatctctgtcttatagtattgtttagaactccaaagccattttcattcctggtctttggtttataccctgtctttgcatattggagccttttagggtattttctttgttcccagtgtcctagaacctaataaaaatatatgtaaatgtaaatcatcttttttttatactacataccaagtggacccattaaatatggagactcatttctttcaggtctgggaagttgcccttaatgctactttttagaacaatctgtattttctgttttctttgaaaaatttcaaacatagagaaaaaaagattattccagtgaattctgaatacccattttcttcctctgtttgggccactgtaacaaagtaccataaactagttatcttataaacaaaagaaacttatttctcacagttgtggaggctggaaagtacatgatcaagatgttggcagattcagtgtctggtaaggacctgctttctgcttcatagttggcaccttctctctttgtcctcacatagtaaaaagggaaaggcagtcctctgggtactcttttttaaggacattaattacattcatgagggctctgccctcatgacctaatcacctcccaaaggccccacctccttaccccattacattgataactaaagttcaacatttcatttgggggttgggaggacacaaacattcagactctatcatccatcacccaaattcttcagttgttgccattttgccacatttcctttatctttattaatacacacacatacacttttttttgtgagtcatttgaaaatatgttggggacatcttcacattttaccattaataattttaacatatatctccttagtattaatgatatatctccaacctaaggaaattaaaatagacttaataatattcttaagcattttatatttagacagctccagtagtcttcaagctctctttatttagctgctattgtgtttgtttgtttgttttacttgggtatgtgtttgcctgatctaggatccagtcaagatttatatattgatttggtcattggatctctttagtctcttttaatctggagcagtctctcattttttgttttatatgactttgaatttttttggtttttttgagatggagtttcactcttgttgcccaggctggagtgcaatggtacgatcttgtcttaccacaacctccgcctcctgggtacaagcgattctcctgcctcagcctccctagtagctgggattacaggcatgtgccactgcacccggctaattttgtatttttagtagagacggggtttctccatgttggtcaggctggtctcaaattcccgacctcaggtgatctgcccaacttggcctcccaaagtgctgggattacaggcatgagtcaccatgcccggccctgttttatatgacattgaatttttttgagaatccaggacaattattttatagaatgtcacataacctttatttgtctcatggctttctcatgtataggaagcttagattcaggttaaatatatttggcaagcataccacataggtggtatgatggtacatcttttattgtattacattgggaggaacatattgtcaggttgctctactactgttgatgccaagtgctgtatggatgtttgtcccctccgaatcttatgttgaaattttccccccattgttggaggtggggcctaatggcaggtgtttcagttatggggatggatccctgatgaacagattaatgccctccctggggggcagtgggtgagtgagttcttgctcttattacttcccaaaagagctggttgttaaaaagaacctagcacctctctcgaccctctcttttgcttcctctctctccacataatctctgcacatcccagctcctcttcaccttctgctagtggaagcagcctgaaaccttcatcagaagaagctgttggtgccatgcatcttgtacagcctgcagaactgtgagccaaataaacctcttttctttataagttacccactcttagatatgtcttcatagcaacacaagtagactaaggcatcaagttttaccacttaagattaaggtggtgagtaccaaatctttctattaaacaggtatatatttttccctttataattaataaataatctgtagagtgatactgtgagatcaagtgaatatccttttccgcagcacaattcattatccagctttagaatccattgaggatcctgaatcttttatcctattgacgatttttaaatggtgattttcaggttcctccgtttcttctagcacactttgtagattcttagcaaacttctaaaaatgatttcttctcagtagacgttggactttgttgcttgatctcccatattttcctattttccatttctgtatcttttttgtatgggttttaaagatattttattatttacttttgaatgatttgtttttattccaactttatattttcattttctatgaatacttttttcacttaatatttctttcatattattctattcttgtatcatgtggagtagcttctcatatccttatgagaatatacgttgtgacttttgaggttttctttgttctcctatatagtctgtcttctgagttgctttggttgctttgtttactgtcttttatcttacaggcttttctcaaatatctaatatttgcctattttttgtttctgttgtttttgtatatatttaagatatacaacatgaggttttgatacatattatgaaatggtgactgtagtcaagcaaattaacatgttcatcatctcacatagttacactttttgtgtgtgtgtggcaagagcacctaaaaatctactctcatcaaaaatctcaaatacaatacaatgtcattaactatagtcctcatgttgtacattggatctctagacttattcattctacatgtctgaaactttgtatcctttgacctgcatctccccattttctccctgacagtccctggtaactaccattctgtatgctatttctgtactttttttttttttttacattctacatataagtgagatcatgcagtatttctcttcgtctcccttatttcacgtagcataacgtcctccagtttcatgtctgttttgtcaaatggcaggatctctttcttttcaatggtgaataatattcatttatatatatcacaatttcttcatctgttcatccatcagtgggcacataggttattttcatgtcttggctattgtgaataatactgctttgaacatgtgagtgcacatatcttcatgaggtagtgatctatttgtaatttagagtgggccctaagaagctgtatgctatatattttgtatgttgattgttagacttttatgggtacttagttccctccacttcttaagtttttctggggttctgcagcataaaccgtacacttttttatacacaaaaagtgtaactatgtgtgggctttccttacttttagttaagattatatcttttttgattggtcattgtttatcttacactttcaacttaaaatgttggctgggcatggtggctcatgcctgttatcccagcactttgggaggccaaggcaggtggatcacttgaggtcaagagttcgagaccagcctggccaatatggtgaaaccccacctctactgaaaatacaaaaatcagccaggtgtggtggtgggcacctgcaatcccagctgtttgggaggctgaggcaggaggaccacttgaacctgggaggcagaggttgcagtgagctgagattgtgccattgcactccagtctgggtgacacgagtgaaactccactaaaaaaaaaaaaaggggggtggggtgccaggcctggtgactcatgcctgtaatcctagcactttgggaggctgaggtcgggagttcaagaccagcctgaccaacatagagaaaccctgtattactaaaaatacaaaattagccaggcgtggtggcacatgcctgtaatcccaggtactgaggaggctgaggcaggagaatcacttgaacccgggaggcggaggttgcagcgatctgagatcatgccattgcactccagcttaggcaacaagagcgaaactccatctcaaaataaataaataaataagctgaaaatgttttgttgctgcagcttcctctttaatttccttttatgtggtggttttgttctgttttacaaattccttttcattccttttagtgaggttttggaaagcgtacggggataaatgcacgtgatccacttgagctttttcagagaaattatgttgtatggctagagaaatctagtttttagatgtttatttgtaaggataatacattttgcaaataatttattatattattcaataaatgcatttaggttttttttgcatgtaccagagttcaagttgattaaattaatagatattatctttgtcttcatgaagcttggctctattgtagcagacagaggttaaacaagcattcaaacaaatatgaaaaatttaactgtagggaatggatacgtaaattacctattatcaaaacaaaacacaaagaaaagaggaaaaaagagctctgagaaatgatagtagagtgtgcataattcagactgaacatgtaggaaatattttaaagatacatcatttagcagagacctaaaccactgccagaaacttgcaaggccaagagtaggggcagtggatatagggggacatttcaggcagatgaaaccatgatggggatgggtcggtacagttttgtgcatttgaagaactatgaagactacatagtagctacagcttattgttgggtggggggtgcagggagggatattaggttgaagagacaggcagatcactgaggaacttttaagagcgagttcattttgagcagaacagttccaggctaaatatcactctgggtgctaagggtgcaaaactggaaatgcaggcaggtagaagaaatgctggtttagtgtccaagcaaaagataattttgatttggattagccagttggagactgaaagaacaatttcaagacatatttagacctgctctaaacaggattgttatgtaagttgtagaaagagattggtgccgaatgttttcactttttgggatttgaggtattcactcagggccttagatagtatctttaaatccattccctttcctagcctctacttttgaggcaaataagtctcccaaaataataagcactgcatagttactttatgcaagtatgtaagtagatttggtgtgatcagaatcattccataatcatcaaagatgaggttcaggatatttatatatcttcatctttcttgcagtcttctagtagtatcacattgcctcctgtcttgtcttccctttcctcttatgttaaaaccagattctgttcctctgctgtagcccttactgagctccatcttctctcaatgttatcatcatagaatttggaggcaaacttatttcttaaatggcataaacaaaccacattctaaccacagatgaatcttccctctccatagctcattccatactcatttagcacattagtctttcattgggaaactgctctttgtggattatctttcttttctgtctccatcagtttatatgcaaattatgtttattactgaaacatcccagatttcccaccccaggaaaaatgtagtactcccaacaaccctgataaatgaatatgagaattactctcatttataaatgtttatagcactagattcatctcttaaaaaattaagacagggccaggacatctgtataattaccaagctttcaaagtctgcaggacttttaaactaaactaaactactatttaaaactactattttaaataaatatctaaactactatttaaaaataatctgtttcctgaaaacctcctccactttctagtctgacttttactcattttctctgcttccctaatctgtttttcaaattgcccagtcatatgtgagaactgtataaaccactcaatttttatgaaaattaaattgtagttaagtctttcgtatctattataaacgtttaatctctcccagaacacaaaaaagtgaatgtttgcttttatattttctttcagactatgaatcaaagttgagaccaagaaattatttctgaaaaaggatatggaaaaccttacaaaacacagcattgagtgttcaagtttcagaggtgattgggaatgtaaaaaccagtttgagagaaaacagggatctcaggaaggacatttcagtgaaatgatatttactcctgaagacatgcccactttcagtatccagcatcagagaattcatactgatgagaaactccttgaatgtaaggaatgtgggaaggattttagttttgtatcagtccttgttcgacatcagcgaattcatactggtgagaaaccttatgaatgcaaagaatgtggcaaggcctttggtagtggtgcaaaccttgcttaccatcaaagaattcatactggtgagaagccttttgaatgtaaagaatgtgggaaggcctttggtagtggctcaaaccttactcaccatcagagaattcatactggtgagaaaccctatgagtgtaaggaatgtgggaaagcctttagttttggatcaggccttattcgacatcagatcattcacagtggtgagaagccttatgagtgtaaggaatgtgggaagtcctttagttttgaatcagcccttattcggcatcacagaattcacacaggtgagaaaccttatgaatgtatagattgtggtaaagcctttggcagtggttcaaaccttactcaacatcggcggattcatactggtgagaaaccttatgaatgcaaagcatgtggaatggcctttagcagtggttcggctcttactcggcatcagagaattcataccggtgagaaaccatatatatgtaatgaatgtggtaaggcctttagttttggatcagcccttactcgacatcaaagaattcatactggtgagaaaccttatgtatgtaaggaatgtgggaaggcttttaatagtggctcagatctcactcagcatcagagaattcacactggtgagaaaccctatgagtgtaaggagtgtgagaaagcctttagaagtggttcaaaacttattcagcatcaaagaatgcatactggagagaaaccttatgaatgtaaggaatgtgggaagacctttagtagtggttcagaccttactcaacatcacagaattcatactggtgagaaaccctatgaatgtaaggaatgtgggaaggcctttggtagtggctcaaaacttatccaacaccagctaatccatactggtgaaagaccctatgaatgtaaagaatgtggaaagtcctttagtagtggttcagctcttaatcggcaccagagaatacacactggtgagaaaccctatgaatgtaaggagtgtgggaaggctttttatagtggctcaagccttactcagcatcagagaattcatacaggtgagaaactttatgaatgtaagaactgtgggaaggcttatgggagggattcagagtttcagcaacataagaaaagtcataatggtaagaaactctgcgaattggaaactataaattgaaattatgtgctgaaggaaggactctaaacatatgacttaagaaaattcatagtggtgaaaatctctacaaatagaactaaggtacaaatgccttacttatgcttcacaggttagtcagtctaagaatatttatacaggaaaaaaatcaccccaaataaaataaatatttgaagatccttatctatattcattccttcattacttttggaaaattcttacttgtgaatgttaaaaatgaaaaaaaaatcatttattatattttgcctcaactttaaacattggaaaactcatttctgggttaatcctactatattttttcaatggtcttttttttttgtattatacagaattactgattcattgaaaaattattttatttattgcaagtctaaatttatcctttttttctttcctgattatcctaacaccatttattcaataaccttgtccattttcatattttttttattgactatttgatggtaagttacatttttattcacataaagcttggatatcaggtcagtgtttttttgtttttgtttttgtttttgtttttttgagatggagtctcactgtcaccaggctggagtgcagtggtgcaatctcggttcactgcaacctccacctcccgagttcaagtgattttcctgcctcagctccccagtagctgggactacaggcgcccgccaccacgcccagctaattttttgtattttcattagagatggggtttcaccacgttggccaggatggtctcgatctcttgacctcgtgatccatctgcctcggcctcccaacgtgctggaattacaggcatgagccaccatgcctggcccagtgtttgttttttaaatttatatatatgtatctatgtctcatcctgtttatggtcaataactgttacttttaagtatcctttaatacctgtaccttttgttttagaagattgtttactttccttttataaaattatactctccattttagcaaaacagctttccctcatcataatgtagataaaaagaaaaaaaggatatggttacctgtaatcttaccaatcatagataatcactgtcaaacttttggagcaaatcctttaatactatctctcattgttttggaaacaaggtgtgattatgctatactataaccagcccttaatattttttgtctgtaaatatgttgttaccattttattggctttatagtattcacctgtctttatcaaaccccaattttgtcaaatattaaaaattttgccattataaacacttaccttgatggccccttttcagtgtgtctgatttatttatttattgttcatttcagagataatgtatcaattgcttttgcatataaaagatttttacattacagataaagccggcctttcctttgagcagcattcctggcctcagttcctttccaatgttaaccaatttacttattcttccagatccttttatatgcatctgtaacatacctatggtaatgtgggtagaatcaatacctcagagccttattgtgtggattctataattgtgcctatcacataataaatgcttagtgaatgttacccatcactattatcttctcaagcttcatctttattatttctagaaaaacttttagccatgatccataccttactcaacaacaaagacctcataatggagaaagacattcatttaaatgaatgtagggaaaatttgattgacattctttccttgttgaataagaatatttgctgccaggcacagtggctcacacctgtaatttcagcactttgggaggccaaggtgggtggatcacttgaggccaggagcctagccaacatggtgaaaccccatctctattaaaaatacaaaaattagccaggcatggtggcgtgtgcctgtagttccagctactcgggagtctgaggcataaggattgcttgaacctgtggaggttgcagtgaaccaagattgcaccactgaactccaacctgggtgacagagcaaggctctgtctcagaacaaaataaaaataaataaataaaaaattgtcctacagaaaaaataataagattataaagtgtgagaagacaaatacactataaaatttgtaccagggtagaagtaaaaaaactagcagttttctccattgaaatccaaatattaattcagtactcatctgcatgattctttgcttaaaaataaaatgcaggcaggcacagtaactcttgcctgaaatctcagcactttgggaggctgaggcaggaggattgctggaagcctggagtttgagaccagcctgggtaacatagcaagcccccatctctacaataaaagttttaaaaatgagccaggcatggtggcctccagctaccagaggctgaggtgggaggatcagttgagcccaggaattcaaggcctcagtgcactattattgtgccactgcactccagcctggaaaacagaataagatcctgtctctaaaaataaatgagtaaattaactaaaatcaaatacattattttttaaataagtggcactgaatagattacatagcaaaacctgtgaggacctgtaatatacagaggaaattttatagctctaaattcattcatttgttagaatgttaaagaaattataaataaagaaaccaagcatataacccaagaagctggagaaagaataactacaacaaaaaccctaaggataatgggagggaaaaataattttagaataaaaaaagctagatcaatcacaacctaatgttttgaaaacaaaaatagtagcagttctcataaataaaggtatatgaacatgaatgcaaaagcgacattactctagagactttacagattacaggttgagcatgcttaatttgaaaattcaatatctgaaatgctccaaattccaaaactttttgagctcaacattatgctcaaagataatttcagacttctggattaagtatgctcacctggtaaatataatgcaaatattccaaaatccaaaacacttctggtcccaagcattttgagggatactcagcttatgtttattacgattacatgtaaccttttaataattattttgaaaattgaacattttagtaaaaggattttaatcaccagaactgactcaaagtggcatagaaatgggtattatataagggatataaagcaaaaactatatctaggaaggctggggaaaaaaaccctgtagccaaagtctcttttataccccccagtcaggtcccttgagtgaatattctggcattcaatcacattttgcattggaaagagcaaaagatgaaaatatatcagcattagtatattttatgtctttttaatttgaggtaattagattttttaatttttaaaaagaatggaataggaatcattaaaaacagactaaagtaacatgaaatcttaagatgctacatataaaatacatcactttaaatatgaaactaatttttaaagtcctgcagattaatctgttggagatatatattgaaacccactttcagagacattaaaatgcggggtaaaaagtgcattttagaactgataaactacttcatcaatgattttaatggttccttttctttagattttcaaattcgttgatattggcaaacagaattggctttcagttttcagtctctgtatatatatttgtatttctactcatagttttatttttaaaccactttattcctctaaattgatttgaaggagtcccattcattttacttgttttttttttaaaaaaaaccttatctgggttttcttcatgcttttgactatttttgtttgctttttctatttcaaaaatatatttcactattttctttttatttgtgtgtatttctgttgagtacatgtgcttggttaatatattttcagtctcttttaaattggaagcatttaaggctacaagatttcctttgaatattgctgtatctggggcccatggtttttttttcttcttgagatggagtctcgctctgtcaccaggctggagtgcagtggcgtgatctcggctcactgcaacctccgcctcccaggttcaagtgattctcctgcctcagcctcctgagtagctgggactacaggcatgcgccaccacgcctggctaatttttgtattttttagtagagacggggttttacca[136 bp omitted]tttaatcttgatttctctttgattcactagttacctaggtgtctgtatgtttgtgtgtgtttctaaattttcaaaaacctgtgaaaaaaatttagcatatgaacttataatgtgtgtgatctgtgaaacttcattaaaaagttaaaacattaatttattatttgtggccaaatatacgttaggtttttaatacattttatagatatatgatgtgaaataatatatattctctataaaacacaaagttctacttaattatattaagcttcgtgattatattatttaaatatcctctgattattttgtttaattctgaaaagtgggcacaaaacgcccagctatattgtttcaaggtcttctgttaatataggggttttactttttatgtttggttgctgtatttttcactgtgatgttgaattccaatttctctaatattgaaaattctgctttggccagtagagctgcactaggtctgttgtgtcagcttgttctaggtatatatccttataaacaccatatagttagtgttttatttttaacccaatttgtttttgtattttaattggagaacaccatatatctataggcaggcttactcaatttctatgaaatcaccttttaaaatatctttttctattaaagagcagaaaagtaactaaaattctcaaactctgttgctctttcctatgtagctactcgtcatggtcatttaatgcatcgtttctcttcatctctctgttccctaaagattgaagttttctaagactcagcctctgacacatttactaattatacttaattgttccttggtgatttcacccccgtgggtttgtttcccttgaactccacactcactacgttcagtagccttctctacactacttgaattatttttatttaggtatataaaatactggtggcaatagcataaattctaagtgttaaacttgatgaagtaatattgtacacctatgtaagcactgcccagactgatatacatttacagcctaaggaggcttctttgtgctgctttgctattaatattccattgcccagaaatagcccctctcctaatttccataaccagagataagcttacatgtttttccacttcatgtaaatggaatcgtacgctgaaccctttttgtgtctggtttcttttgctcaacattatttcatgcaacaataaggatggctctctcagacataatattcatttttatttatgtagtgttttatgggaattgcactgagttagagaaactgaagtctgaaggaatagtttccacaagactgccctcatttcagacaccaggcacaagttcagaggttccaagggctacccatacttcagaccagctgactacaaatttgggacttgtcatgactacccttgataattcagtataataattcacagaactcaagataatactatacctatgattacaacttatttatttttattttttttgagacagagtcttgctcctgttgccccggctggagtgcagtggcacgatctcggctcactgcaacctccgcctcctgggttcaagcgattctcctgcctcagcctcgtgagtagctgggattacaggcacccaccaccatgcccagctaaatttttgtacttttagtagagacg[131 bp omitted]tacaaattacaactagccagaggaagagacacatagaatgaagtctgagaggggtccaaagatgagtcttctggtcatcctatccctatggagtcctggatggcattacctccttccagctacaatgtgtactgataagtgttgcaatccagggaagctcaccttagcctttggtttccagtgtttttcttggggtttgataatatactgcccacatagctgacctttgtctttctgcccttcttgctggtttgtctaatactgtttgtctgccatttccccagaagtcaaaactgagatagcatgcctcaaagcactcatcataaatcatgttatactgtcgggtggccatccaaagcacccagccaaaccaagacactgttattgggcaggacattccagaggcctagagtacccccagtgggcctcccagtacccaaggtaaaggcaagacctctctttgggtgaagttaatttatcactatacaggaatatactttgacttactcattctttcgttgatgggtatctgtattgtttctacaactctgggaaccttcttatacatgtctttatgtagacatatttactcttttctattggcagtatacttcagaatggaattgctgagtcagagataggctatatttagtaaatgtcagttttccaaagtgattgtgcaaatttacactcccacaaagaatctgtaagggtttcatttgctgtatgtcctcttcacacttagtattgtatagtcattctaatgggactatactaatgtattagttactagaattatatatagaaatattatataactattatatagttatataagtatgtagaaagttacattttcacttccaatgactaataatgttgaataccttttcatatgcttgcttactagcttttttgatatcttgtatgcagggttggtaagactttggccgttttaaatgcgtatcgtgtcttttccttattgctttgtgtgaattctttgtgtattttggatctgatttgtttgctagatatgtatgttgcaaatgccttttgctttgtggcttgcatttccactctcttaaaggtatgggttgatgaattggagtttttaattttaatgaactcctgtttatcaacctttttctatatatggttagaactttgagtcttaaatgtttgtgtgcgtgtgtgtgtgtgtttcatgcctacaaacttatgaaggtattctctttcttcccctagaggctttatttcaccactcacatcttgcctgggattacaggtgtgagccaccgtgcctggcctatgattacaactttattatagtgaaaggatacatatttcaactagccacaggaagagacacatagaatgaagtctgagagaagtttggtgtacagtatgagatttagtgggtcaagtttaattatcaatactgctacggatatccaagttaatccagtgttatgtaatgaaaagtaaattctttccccccagttatattccaattctacccgcctctcatcacctttcctgataccatcctgatcctaaccatggttatgttacttagatgtttataataacctaatttgtctgtttgtgtagctttcagggcgttcacaacagcatagccacagtgatttagatgatatcactccaagaaaatttgagcaacaaataaagtggtattggattataacccgaagtataaaataaatatccatgcattcatactgatatgactatattatcagataaataactaaataaatggagaagagataaatctccagtacagaattctaaataatttatgtagatattctgccttcaggaaagtggagcataaccccgctccttaagtacgtgctgtgcatagtgacttccaaagatgactgtatgggaaaagggagaaaagactaaatttacactggagaaacttgacaaacactccctcactcaggtgatcaagaccaacaaaaagtcatcatgctgatagtatgaatctttgatatctatgaggaaaatggcactttacctctgtgatcttcctcctgcaaacaacctcagtctaatcatgagaaaaacatcagtcagatcttagcggaggaacattctacgctatactgacctcctcaaaatagttaaggtcatttaaaatgaggaagagggccaggcccgctggctcatgcctataatcccagcactttgggaggccgaggagggtggatcacctgaggtcaggagttcgagaccagcctggccaaca[140 bp omitted]cggtgaaaccccgtctctactaaaaaaaaaaaatacaaaaaattagccgggcgtggtggtgggcgcctgtaatcccagctactcgggaggctgaggcaggagaatggcatgaacccaagaggcggagcttgcagtgagccgggatagcgccactgcagtccagcttgggcgaaagagtgagactccgtctcaaaaaaaaaaaaaaaaaaaattagctgggggtggtggtgggtgcctgtaatcccagctactcgggaggctgaggcaggagatccacttgaacccgggattcactgcagagattgcagtgagctgagaccgcaccattgcactccagcctgagcaacgagcaaaactccatctcaaaaaacaccaccaccaccaccaccaccaccaacaacaacaaaaaaaacaaggaagaaactgtcacagccaacagtaacctaaggggaaatgatgactaaatgcaatgtgttctcctgcttagaatgctggaacagaaaaaggaagaaaagcttaaaaacctaagaacatttggaataaagtgtaagctttagctaataataatgtaccaatacttgttaattaattgtaacaaatgtaccatataatgtaagatgtttttagtagtaggggaaactaggtgtagggtatatgggaattctctctattgcttttataattattctgtaaatctaaaaactgttctaaaacaaattatatattttacaatagagaatgaagctgagtattcaaattatttataaatagtcattcctgtgtatccacagagccggatttatcatgatttgagtaatgttattacatggagtcatttacatctatgatattagatccatgttttacaaaaggaacacacgtagagcccagaccactgtttcctgacatgctaggctaaaagtcaagattcgagactcagaatcattttggtcctcttcaacattttactccatctaatggcacactctacttattgggtctcctgaactctagagccagtaacagtgatcctaaagtcattctcatgattttgcctgaggtacaatttaaattcttggatgactccaaatctgcagaaatattaatctagaaaaaataatagttatgtgtacaggaaaaactgtaaattttactacatgtgaaaaagatttctgcttattaaaaaataccaaagaggccaaaagattaggaaaagttactgaaacaacatatgacaaacactaaccttaatatataaagaaatatatatatttcttaaatatgtaaagaaatttgtaatcagtaaagatgaccaacaacgtgatggtgaaacagaagagtttatagtaacatgaacatgcctgttaaacatttgaataaatgatcagtttctcataacatagaaatagaaatgaaattataaattgtgctgtcttgtttgatcaaaagtttgataaaacatttaatagtatacatattccagggaagatgtttcctgttctatctcccaacacatacagtgttattaccacaatatagtgtcaaaccgtcaatgcaaaaatctttaatctccttgccctgatgatatctgtctctacaatatccagtactcccacgtcaataaaatttatacacccattttctgttcccacctaccacactaaattcttgtgatctttctactctgcactctgaaatccacagtaacttattagcataatgcccccaccttttaaaaaagcattcttaatttgccttttattgtttcttaattataggtttaggaagttacaagggcagttgtgttacatacacatatagtgtagtggggaaagtgttggcttttaatggactcattacctaaataatgtaccttgtactaaataggattttttttggtttttttttgagatggagtctggctttgttgctcccccggctggagtgcaatggcataatctcggctcactgcaacctccacctcccacattcaagcaatttgctctgttgcccaggctggagtgcaatggcactatctcagctcactgcaacctccgcttctcaggttcaagtaattctcctgcctcagcctcccaagtagctgggactacagtgcctgccaccatgcccagccaatttttctatttttagtagagacagggtttcgccatgtcagccagactggtctcaaactcttgacatcatgtgatctgcccgccttggccttgcaaagtgctgggattacaggtgtgagtgcctggcttatttttaattctgtgtatgtgatgaatcatgtattgagttgcatatgttgagccatccttacaccccaggaataaaatccacttgactgtgctgttactatcttttttatgtactgtttgatttggtttgctagtattttgctgaagatttttgtgtctattttcatcagggatattggcttgtagtttttttgtgtgttttatccttgcctggcttcagtatcaggatgatactggctttgtagaatgagttagggaggattccctcctataatttttggaatagtttcaatagtgctgttactagttcttccttgcatgtctagtagaattcagctgtgaatctgtctggtcctgggctttttgtttttgcaagatttttttctattactgattcaatttcaatactcagtagtctgttgaggattcctatttctccctggttcaatcttggaaggttatgtgtttctaggaatttatccacttcctctaggttttctaatatgtgcatatagtttctgctgatattttatatgtctgtgttatcagttataatatcaccttatcatttctgattgtatttatttgaatcttctttttttcttggttaatctagctagtggtctgtcagttttatctttgcaaagaaccaactttttcttttattgatcttttgcattcctttgttctcagtctcatttttgcctgctctgatatttgttattgcttttcttctgccagctttgggttgagtttgttttgttttttcctagttccttgagatgtgacgttaggctattcatttgagatttttctatctttttggtgtaggcatttaatgctataaaatcctctcttagcactgcttttgctgtatctcagatgttttcatgtgttttgtctctattttcatttatttcaaaaaattttaaatttccaccttagtttcatcattgatccaaaaatcattcaggagcaagctgtttaaattccatgtatctgttttgagagttcctcttggtattgatatctagttttattccactatggtcagagaagatgttagatatgattttgtttttttaaaatttattgatacttgctttgtggtccagtatatgacctatttttgagaatgttccatgcacagaagagaagagtatatattctgtggttgttgggtagaatgttcttcagatgtctgttgggtccatttggtgtagagtccaatttaagtccagagtttctttgttgatttctgtcccagtgatctgtctagtgctgtcaatggagtggtgaagtcccctgctattgttgtattgctgtctatctcttttcttaggtctagtagtatctgtgttatggatctgggtgttgcagtgttgggtgcatacatatttaggattgttttatcttcttgttgaatttatcctttatcattataaatgaccttctttgtcctttttaatttttgttggtataaagtctgttttggccatcacggtggctcacgtctgtaatcccagcactttgggaggctgaggcgggcagatcacttgaagtcaggagttcaagaccagcctggccaacatggtgaaaccccgtcgctactaaaaatacaaaaaaaaaaaaaaaaaaaattagccgggcatggtggcgcatgcctgtaatcccaactacttgagaggctgaggcacaagaatcgcttgaactcaggagctggaggttgcagtgagctgagatcacaccactgcactccagcctgggcaacagagcgagactctgtctcaaaataaaataaaataaaataaatttgactaacaacttatgtataaaaggaaattacaaatatattagacaaaatcattctaacagggtattatgggttgaactgtatcccctaaaaagatatgctgaagtcctaacccctggtaccggtaaatgtgaccttacttggaaacagggtcttggcagatataatcaagttaagatgaggtcaccaggtaaccccaatctaacctgactggtgtccaaataaaagacatacacagagatacacagcgagaatgcaatgtgaagatggaggcagagattggaatggtgtatgtaaaagccatggaatgccaaggactgccagctgttaacagaggttaggaaaaaggcatagaacagatcctcagagtcctcagaaggaaccaaaacgatcagcacccttgagtttagatttccaggctctaaactatgagagaataaatttctcttgttttaagccaccaaggttttggtacttggtactttgttatcgtatcgtttaaaaacgaatacataggagaacctttgataatatgtatcctaatttgttctccttacctgttttaaaaaaattattataaaggttaacaaaatggtcttactttactgtcattcaaccagtatgaattccctcatggcgaatgaggtcagagcgactaccaaaagcctttccacattccttacagtcatagggtttctcaccagtgtgaattctctgatgtcgagtaagatttgagcctttattaaaggccttcccacattcattacattcatatggtttttcatctgtatggattctctgatgttgaataagttctgagctctgaataaaggcctttctacattcttcacattcatagagcttctcaccagcatgaattctgtgatggttagtaagtgttgaggcactattaaaggccttcccacactgcttacattcataaggtttctcaccagtatgcattctctgatgctgaataagccttgagtgttgagtaaaggctttcccacattctttacattcataaggtttctcaccagtatgaattctcagatgtagaaaaagttgtgaacttttagtaaaggcttttccacatactttacattcatagggtttctcaccagtgtgaattctctgatgatcattaaggtttgagcaatacttaaaggcttttccacattccttacattcatagggtttctcaccagtgtgaatcctctgatgttgagaaaaatatgaactacaactaaaagccttgccacattccttacattcatagggttttttaccagtgtgaatcctctgatgtcgagtaacgagtgagccacgactaaaggacttcccatactccttagattcatagtgtttttcaccaaaatgaattctctgatgttggataaattgtgagttttgattaaaggtctttccacatatcttacattcccatggtttctcttcactcatagttttttgaggtggaataagaaatgtgggctgaataaaagtagacatgtcttcacgggtaattattacttgactgaaatgtctcttctttagagataatattttggtctcacacattgattccagatctgaaagaaaatacaaaggcaaataaattttcctattctgggcaagttaaaacttctaaaaaagaaatgggagaattaaactgaaaagaatatctgagaaattacacagttttcaaaggtggagaggcaatctgtaaaactgacaagaaaagcacagacattaggagaggtaataaaagaagctgaggatgtggattcagaaagtagatgacctctatgatcctcaaattttggtctgaaccagagtcaccttaagccttggtgaatacacagtgttcagcaccatcctccatattatagagagattctaattaaaaaaaaaaaattttttttgcccccaccccagatcccccacaggcgctgcctgagacccagctctgtgtctcctcgtcgtacagcttgtggagctccgactgcaaggccatcagcatgcccaggcaggggttaagctggagggccatggaggaggacaggccagcaggatgccgcttctgctccagggcatgcaccatgcgtgagatattctaattatatacacgttcataaacatatgctcacatgcacagagtatgatactgtatgttttgcaattcgtagataactgtcagacctacatgaaaggactgttaagaataacaaatgtgttgaaaggtttaaatgtcgggggcgggtggagttcagtgactgtgcaatggtatactggcaaatcaccagcctccgacaaatctaatatgctgaacacaactggtgggaagagtagacaggtacatctcttctgtgcatacagcatgatatgggctaggaactcactgaaaataatttgctctggaattctgtgatgttgaccttgggagaaagaaatgaataattcaagtcatagcagtgattgagaaggaaggtggctcaagtttgagacacaagagagttaagataggatgaaatgtactctatgagaagaatggaactccatgtcaacatataaacagtgagccccagttctatgctttaaggcaacctctgagccctcttttccttgtttattaaaatgggactgacacttaacttatgattgctaaaaagatgaggaataacgtatataaataatctgatataaagtaagcactcagtattggtagctattattatgaaaaaatgtcatagcaaaaacagatattgggcaaataaaatggcttgaagacatcaaaataaagccagctagactatcttaagtattccctccacacaatcattggccaaacttagtctgggtgagtccctaaaaatctcttaaagttgtcctcatttaattactgaatcccctctttcctagaccactacaggaatctcctaatggtttccccagtatgttctagcaccctctaatccattcagcacctggtgtgatatttggtctcactttgccctcctgaaaatctaaactccttggtaattaccaagaagactccaataatgaggctcttgcctacctctacaaccttgtgttatactccacttccacttgctcaagaagccccagtccttcaagcacctcaagttctccctgcccctcagggccttcccacatggatctcccctttacctggcatacccctcatcctatcaccattgttggccctgctaacaatgagaaaagcctcatcacagcttccactaacaaccaagccctaagccactgaggaactcacagacactgctgacactgattgcagccagagaaatcatatggagattataccactgcatccacctataacaaagccaaagcaacctacccaaccaacactataaatacatctacaggaaaaaggttttccttatgaaaacaaatccataaaattggaaaaaatgaccataacaagaaatacacagatatcaatgtaaggataaaagaaacacgaaaaagcatggaaccatgacatctccaaagtaatacaataatgctccagcaacagattccaacaaacaagaaatctatcaagtgcctgaaaaagaattcaaaataatgatattaaagaagctcagtgggaaacaatagaacatggataaaaaccaaaagaatcagaaaaaacaattcatgatctgaatgagaaattcagcagatagatatcatgaaaaagaaccaaacagaagtcctgaaactgacaaatttcaatgaatgaaataaaaaacacaattgagagcttcaacaatagactagatcaagcagaagaaagaatttctgaacttgaggacagggttttttaaaagaatccaggaagaaaaagtaaaaaataataatttttaaaactgaaaaaagcttagatgacatatgggacatcataaagcaaccaaatattcaaattttgggtattctaggagaagagatgggcaaaggcataaaaacctatttaacaaaataactgaaaactttccaagtcttgtaagcaatatagacatcctgatacagaaggctcaatgatgcccaaatagattcaatccaaaaaggttttccaaggcccattacagtcaaactgtcaaaagtcaaagacagagaattctaaaaaaagcaagagaaaggcatcaagtcacatataagggaaccctcaggcgtcaagtcacatacaagggaaccctcatcagaactagtagcagataccttggcagaaaccttccatgccaggaaagaatgggatgatatattcaaagtgctaaaaaaacactgtcagccaagaatactgtacctagcaaagccatccttcaaaaatgaaggagaaagtttttcccagagaaaatgtatcacaactagggtggcccgatcaaaaatggcaaagggtgtcctacatctggaagtaaaagacatatctaccatcattaaacaaatgaaaataagaagctcactggtagagcagatacacaaatggaaagagaaaggactcagatgtaaccattacataaaaccaccaaaccaaatgataagaggaaagaaaaaggatataaaacaaccataaaaaattaacagattaggaataaatcctcacctattaataataaccttgaatgtaaacagtcaaattccccacttaaaagatacagtctggttgaatggataaaataaatatgactcacctatatactggctgtgagaaactcactttatatataaaatcatagactgaaagtgaagagatgaaaaaaaaatactgcacacaaacaaaccaaaagcaagtgagagtagccatacttaaataaaacagacattaagtaaaaaactgcaaaagaagcaaagaaggtcattatataatgataaatgggtcaattcagccagaggatataaagttctaaatttataggcactcaacactgcagcacccagatatataagcaaatattattagatctaaaaagagagatagggctgggcatggtggctcatgcctgtaatcccaacactttgggaggccaaggcgggaggatcacttgaggtcaggagttcgagaccagccttcccaacatgacgaaaccctgtct[131 bp omitted]gaaacctcgtctctactaaaaatacaaaaaattagccaggcatggtggcaggcacctgtagtcccacctactcgggaggctgaggcaggagaatggtgtgaacctgggagacggagcctgaagtgagccgggttcgcaccactgcactccagcttgggtgacagagcaagactgtcaaaaaaaaaaaaagaaagaaaaaaaaattagctgggcgtggtggcatgcacctgtaatccgagctactcaggaggctgaggcaggagaattgcttgaacctgggaggcagaggttgcagtgagccaatattgtgccactgcactccagcctgggcgacggaactagactctgtctcaaaaaaacaacaacaaaaaaaggtagactcccataaaataatagtacgggatttgaacatcccactctcagcattagacagttcatctagatagaaaatcaacagctttggatttaaactggatattagaccaaatggacctaccagacactaactgaacattttatccaacagctgcagaatacacattgttcctatcagcacatggaacatcctccaggaagagaccatacgttaggccataagacaagttataactaatttttaaaaattgaaatcatatcaagtatcttctcagactacactagaataaaactagaaatcaataacaaaaactttgtaaaccacacaaataaatggaaatttaaacaatgtgcttgctcatgaatgcccattgggtcaattaagaaattaaagatcatcaaagactactacaggcaactatatgctaacaaatcagataacctagaggaaacagaaaaattcctggatacatgaaaacctaccaagactgaaccaggaagaaacagagcagaagaacctgagcagaccaataacgagtaatgagattgaagcaatagtaaaatgtctcccaacaaaaaaagcccaagactaaagggctttactgctgaatcctaccaaaattacaaataactaacctcagtttttctcaaactattccaaaaaatggaagagaagttaattcttcctaatccattctacaaggccagcattaccctgataccaaaaccagagaaggacacaacaacaacaacaaaaagaggtgatatccctcatgaacatagacacaaaacccctcaatgaaatactagcaaatgaaatccaataatacaacaacaagataatatacaacgattaagtgagatttttcctgaaaagtgcaaggatggctcaacataagcaaatcaataaacatgatgtatcagatcaacaggatgagggataaaaaccatatgatcagctcaatagatgcagagaaacatctgataaacttcaacgtctcttcattataaaaacctctcaacgattaggcattaaaaaacataacataataaagaccatatatgacaaacgtacagctaacaccatactgaatggggaaaagccgaaagcttttcctctaagaactggaacaagataaagaagcccacattcaccactattattcaatatagtactggaagtcctatccagagcaatcaggcaagagaaagaaataaaaggcatccagattggataatagaaagtcacactgtccctttacagatgacatgatcttacatatatttaaaaacctaaagatgccaccagaaattcttggaactgatcaatgaaatcagtaaagttgcaagatacaaaatcaatatacaaaaataagtagtacgctgggcacggtggctcacgcctataatcccagcagtttggaaggccgaggtgggtggatcacttgaggtcacgagtttgagaccagcctggccaacatggtgaaaccttgtcttgactaaaaatacaaaaattggccaggtgtggtggcaggcacctgtggtcccacctacgtgggaggctgaggcagaactgcttgaacccaggaggtggaagctgcagagagctgagatcatgccattgcactcctccagcctgggagacagagcaaaactctgtctcaaaaagggaaaaaaaaaggatttctatacatccacaataatgaattagctgaaaaagaaatcaagaaaacaatcccatttattaatataatagctacaaaaaacaacctagaaataaatttaaccatgaagtgaaagacctctgtaaggaaaactacaaaacacagacaaaagaaattgaagacaacaaacaaataaaaagatatttgcatgcttatgcactggaagaactattgttaaaatgaacatacttcccaaagcaatctacagattcaatgcaatctacagattcaatgcaatcccgactgaaatgccagtcagtttttacatgaacaggaaaaaaaatcctaaaatttgtaggaaaccataaaaaatgccaaatagccaatgcaatctgtagcgaaagaacaaaagtggaagaatcaaacttcaaaatatactacaaagctgtcgtaaccaaaacagcatggtactgtcataaaaatagacccaaagaccaatggaacagaagagagaacccacaaataaatccatgtatttatagtcaactgatggttgacaaaggtgccaagaacagacatagggaaaaggacacgctgttcaataaatggtgctgggaaaactggttatccatatagtgaagaatgaaactagactgtatctctcaccatatacaaaaataaactcaaaatgaattaaatacttaactataagaccccaaattataaaactactgcaggaaaacataggggaaacacttcagaagaataggcaaatatattttagataagacctcaaagatattttcaataaggggcaacaacaaaaaaatagacaaattggactatattgaactaaaatgcttctgcacagcaaaggaaacaatcagcagagtgaagagacctgtagaatgggagaaaatatttgcaaactcttcacctgagaagggactaatatccagaattaacaaggaagcaaaaaaacttaatagcagtgccatagcggctcataactgtaatcccagcacattgggaggccaagtcaggaggatcacttgaggccaggagttcaagaccagcctggggaacatagggagaccccccccgatctctataaacagttttaaaattagctaggtatagtggcatgcacctgcagtcttagctacttaggaggctgaggtggtagaatcacttgagcctgggagttcaaggatgcggtgagctgtgatcaggccactgcactccagtctggctgacagtgaaactctctcacatacacaaaaaatgacactgggtacattctattagtaaaagaaaaaaaaatacatatatatatatgtatgtataaaacaattgataaatattcaaagtgatgggtatctaaataccttgatttgatccttatacgttgtatgaatgtatcaatatattgcttgtgctccataaatatgtataatttgtatcgataaaaactaaaaaaaaagctcatgagaaatctaatgtatagcaggaggactatagttagtaatactctattgtatactagaaatttgtcaggaaagtaggttttaagtactcttaccctaaacaaaaaaaaaaagaaagaagaaaagattatagttatttgataggatctgcttaactatagtaattatttcaatatgtatgtgtatcaaaacatcatgttgtacacctagaatttatacaataatttttaaaaaaaggttcatataaaaatttttttttaaacacatataaaaatagaaagaatgagtaacacttagtatttgctagcaaaacagggtgactgtagtcaaaaataatttaattgaacatttaaaaataactaaaagaggctgggcatggtggctcatgtctgtaatcccagcactttgggaggccaaggtgggtggatcacttgaggtccggagttcaagaccagcctggccaacatggtaaaactctgtctctactaaacacacacacacacacacacacacacacacacacacacacacacacacacacaaatttgctgggcgtggtggtatgtgcctgtagtccaaactacttgggaggctgaggcatgagaatcacttgaacctgggaggcagaagttgcagtgagcagagatcacagcactgcagcactgcacttcagcctgggtgacagagtgagactctgtcttaaaaaaaaaaaaaaaaattcccctaaaaactaagagtacaataagattgtaacacaaaggataaatgcttcaggtgatagatatcccatttctcctgatataagcattgcctgcctgtatcaaaatctcatgtaacccataaatatacatacctactatgtacccaaaaaattaaaaataaagattaataaataaataaaaacaaccaggccaagtgtggtggctcactcctgtaatcccagcactttggagggctgaggcaggtggatcacttgaaatcaggagttcaagaccagcctggccaacatgttgaaacctcatctctactaaaaatacaaaaattagctgggtgtggtggcatgagcatgtaatcccagctacgcaggaggctgaggcaagggaattgcttgaacccaggaggtggaggttgcagtaagccaagattgtgccattgcactccagactgggcaacagagcgagactgtctcagaaaaaaaaaaaaaaaaaaaagataacaagtgttagcaaatgatgtggagaaactggaaccatcatacactgctggtgggcatgtaaaatggtgcagccaatttggaaaagagtctagcagttcctcaactggctaaacacagagttatgatatgacccagcaattctactcctaggtagaaacctgaaagaactgaaagcttatgtccacacaaaaacttatagacatgttcatacaacattaatcaaaatagcccaaaagaggaaacccaaatgtccatcaactgatcaatggataaatgtgctatatccataaaatggaatagtatttggcaataaaaaggaatgaaatgctgatacatgctacaacacggatgaaccctgaaaagcattaagttatgaaatagggaatttgcagaagaccacatattgtacaattccatttatatgaaatgtccagaataggcaaatccatagagaaaatcaactcatggttgcctggggctggagggggtgggaataacagctagagtgtacagggatttttctgaggtgataaaaatgttctaaaattgattatggtgatggttatacaactctattacattaaaaatcactgaattgtacattttatgtgggtgaactatatggtatgtgaattataccttaataaagctgaaaataaaacaacaaaattaaaggagtgctactctggttcatagcgagcaggggttgggcaactttttaaataaagaataagatagcaaatattttcagctttgtgggctatccaagtgtgtgattgtagtgcaaagacagtcacagaaaacttctagtagtttgaatgtgctagccttaaaaaataaacaagtctttccaacttggatccggcagaatggctcccacaaagaagggtggtgagaagaaaaagggccgttctgccatccacaaggtggtgacctgagaatacaccatcagtatgcacaagcgcatccatggagtgggcttcaagaagcgtgcccctcggacactcaaagagattcagaaatttgccatgaaggagatgggaactccagatgtgcgcactgataccaggctcaacaaagctgtctgggccaaaggaataaggaatgtcccataacgaatccatgtgcggttgtccagaatacgtaatggggatgaagattcaccaaataaactctatactttggttatctatgtatctgttaccactttcaaaaatctacagacagtcaatgtggatgagaactaatcactgattgtcaaatacatcaaatagttataaaattgcaaaaaaaaaagaaaaaaaaaaacaagtacccccccgcaccccgcaaaaataaccccacaacctcacaagaactgctagctcaaaaacagaaatttttaaaaagactggcttaataattctggtttaaaaatagctatacatcttcctcctgattt[136 bp omitted]catggcaaaatcccatctctacaaaaaatacaaaaattagccggtcatggtgccgtgcacctgtagtcccagctactagggagactgaggtgggagggtcacttaagcctgggagaggcgggtgtggtggaggttgtagtgagccaagatgcaccactgcactccagcctgggcaacagagccagactctgtctcaaaataaaataaaataaaataaaataaaataataaaaactatacaattatgtgttaaaccaaatcaaattatagttctgtcagactttttgacatccaagtaactgttgggccgggtgcagtggctcacgcctataatcccagcactttgggaggccaaggcgggtggattacttgaggtgaggagttagagaccaacctgggcaacatggtgaaaccccgtctctactaaaaatacaaaaattagctggacatggtggcgcacgcctgtaatcccagctacttgggaagctgaggcaggagaatcgcttgaacccgggaggcggaggttgtagtgagccgagatcacgccattgcactccagcctgggcgacagagcgaatctccatctcaaaaataaaaaagaagaagaagaaaaaaagtaactgtgttgctctgtagtgtgtcagtttaaatacagtagtcaagatttttagtcaacttcaagaaaatggacattaagtaagaaaaattaatagataatcctcgaaaacctggatgatttctaacataaggtattaaaacattgatttctaagaatagttttaacaaatatgccattattatttaatatgtatgccttgttttttatgttagaggatggctatacctttgggtaatataaataaatacatgtggttttgttttgttttgtttttgggtcaagggtaattttagttatagtatgtgcagggcacaaatgtgcaaaagggcatttctgtcctttttataaaggcttataaggaatgtgggtggctattgggggagtggtatcacatgtcaggagtctgttaaaatgtttatatatcacagttctcaattacctacctcccacatctttctttataatttgagtagttgagactatctgggaataatcataacagaaatgtaatagatatgcttttgttatcaaggaaattataggttgggcacggcggctcagacctgtaatcccagcactttgggaggccaaggtgggtggaacacctgaagtcaggaattcgagaccatcctggccaacatggggaaacctcgtctctactaaaaataaaaaaattagccgggcatggtggcaggtgcctctaatcccagctactcgggaggctgaagcagaggttgcagtgagctgaggttgcaccactgcactccagcctgggcaacaagagtaaaactgtctcgaaaaaaaaaataacaatagttttgtcttaaaaaaaccaattgttccaaaatgtaaaactgatacataaaaaagacatctcagttttgatgggtttattttcaatccagtatttgaacttgggaagaatatgtaaaaacactcctaagtgactattattaagcaaagatatgaaaatagaaagtacaaactacaatacaaataaacataaggcataacaccaatggggatgcacattaagtaggtaacaggaaagttataacaacatttgtgtaatcaggatataaactatgaatatattgctataggcaagatacatacagtgattacgagagaccagccctcaactatcagaaaaagacatcaagaaatacttttatagtttgatgtatcacagaaagacaaaacatactatgcaaaatttgaaggtaggtatcagaagaatgaaagtaagagttgaaaatgtattatctttgatgagagggactggggcagtcatggtaggaatgtatatgtgaaaaagcaggctgctgtttttcttttttctctttttttgagatggagtcttgctctgttgcccaggctggagtgcagttgcatgatctcagctcactgcaacttccacctcctgggttcaagcgattctcctgccttggcctcccaagtagctgggactacgggcgcctgccactatgcccggttaatttttgtatttttagtagagacggggttttgccatgttggccaggctggtttcgaactcctgacctcaagtgatctgcccgcctcggcctcccaggtgctgggtttacaggtgtgagccaccgcgcctggtctgggctgctgtttttcaatataagctttataacactgtgatttcaaactctgtaaatatattactttaatgaaaattaattattttaaaatgaaaaaggaataaacagagaccacctttcaagtacaaaggtacaaggttaaggtaagattaagaagggggtgaattagcaagttggtagggaggaaaagtggtaggagagacagaaataaaaatacttgaaggcagctaagatcaactgatagctgggaaaaagtgaagattcacaaactcctccctaggttcctagagctttgttaaatctagaattctttctcaagggacacatggatcttctatttccaacgctaactccataggtaacaacatctacttctagggctccaaccattaacttctacttggatcaatttccacttccatattttttgactgttttacaactttcttctgagcgtcctatttgatcttctcattgatgaatcttatcctgtagaaattatttacagcaatgttctagctcctacattagataacaagtttcttaataagcctacacattttctaaactgtacagcacctagcagactagtgtataaaattaaaaagtcaaacatttttataagacttgctatttaaaaatcttaattctccacaaactgatattaatattctcatgaaaaaataacttggcattttgattaagtttcaaatgactatataagctaattctaaattttttttttttttcttttgtgagaccaagttttgctcttgtcccccaggctggagtgcaatggtgtgatctcggctcactgcaacctccgcctccctggttcaagcgattctcctgcctcagcctcctgagtagctgggattacaggtgcccgccaccacacctggctaatttttgtatttttagtaaagatggggtttcaccatg[136 bp omitted]agcagcaggagaacttgctctactagataagatttattacatgctacagtattaatatagtgtggtattggcacaaggatagacaaataagccaaaggaacagaattcagagatagactcacagaaataggaatacctgatttatgacaaaggtagtcctatttctattggggaaaagatagatatagtcctatctctatagaatgggaaaaggacagtcatctcaataaacactaagaagtcaactggatattcacatggaaaaaaaatgaaatttgacccctacctcacaacacatacaaataccaacttcaggaaagtagatctaaatggaaaaagtaaaacaataaagctactagaatataacataggaaatatcttcaagaccttggggtaggcaatgattcctatccaggacacaaaaaagcaacactataaagaaaaagataactgtgaccacattaaaattaataacttctgttcatcaaaaggtactattaaaagagtaaagggcaaggtataaagtggtgggagatatttacatcatgtataaccaaacacagggctgatacatagaatataataagaattctttgaaaccaacaggaaaaagatagacaaccgactaagtttagccaagaaacttaaacaggcatgtcacagaacacacacatcagaataactaaaattaaagggcctggcaataataactggtaagaatgtaagaatgcagagcaatagtaaccttcatactgctagtagaactgcaaattggtataactactttggaaaattggtatatttactaaagttgaacacacacatatcctattgctcagtaattccactcctatgtatatacctaaaagaaatgtgtacatacatttaccaaaagttatacacaggaacgttcacagcagcattatgtttaatagctaaaaactgcaaacaaaccaactgtcaacagaaggacacttatagtaattaataatatat[133 bp omitted]ttgaaaccctgtctctactaaaaatacaaaaaattagctgggcgtggtggcgcaggcctgtagttccagctactcgggaggctgagacaggagaatcgcttgaacccaggaggcagaggttgcagtgagctgagatcacaccactgcactccagcctgggcaacagagcaagactccatctcaaaaaaaaaaaaaaaaaaaaaaaatgtatatatatatatatatgtatatattcatagaatgaaatataacatagccaataagaatgaactaacaccagatatatgcagcaccatagatatgtcacataaacataatgttgagcaaaaaaagccaaaggcaaaagactaaatactgtgtgattgcgtctatacaaagttcaaaaataggcaaaacgaatccatggtgccaaatgtcaggatggtatttattttgagagaggaaaaagaggctggtgattgggaaggggcagagaaggggttctga
